(19) United States
(12) Patent Application Publication
(10) Pub. No.: US 2012/0142754 A1
(43) Pub. Date: Jun. 7, 2012

(54) MODULATION OF TIMP1 AND TIMP2 EXPRESSION

(75) Inventors: Yoshiro Niitsu, Sapporo (JP); Hirokazu Takahashi, Sapporo (JP); Yasunobu Tanaka, Sapporo (JP); Elena Feinstein, Rehovot (IL); Sharon Avkin-Nachum, Nes Ziona (IL); Hagar Kalinski, Rishon Le-Zion (IL); Igor Mett, Rehovot (IL)

(73) Assignees: Quark Pharmaceuticals, Inc.; Nitto Denko Technical Corporation

(21) Appl. No.: 13/246,621

(22) Filed: Sep. 27, 2011

Related U.S. Application Data
(60) Provisional application No. 61/388,572, filed on Sep. 30, 2010.

(51) Int. Cl. A61K 31/7088; A61P 43/00; C07H 21/02

(52) U.S. Cl. 514/44 A; 536/24.5

(57) ABSTRACT

Provided herein are compositions, methods and kits for modulating expression of target genes, particularly of tissue inhibitor of metalloproteinase 1 and of tissue inhibitor of metalloproteinase 2 (TIMP1 and TIMP2, respectively). The compositions, methods and kits may include nucleic acid molecules (for example, short interfering nucleic acid (siNA), short interfering RNA (siRNA), double-stranded RNA (dsRNA), micro-RNA (miRNA) or short hairpin RNA (shRNA)) that modulate a gene encoding TIMP1 and TIMP2, for example, the gene encoding human TIMP1 and TIMP2. The composition and methods disclosed herein may also be used in treating conditions and disorders associated with TIMP1 and TIMP2 including fibrotic diseases and disorders including liver fibrosis, pulmonary fibrosis, peritoneal fibrosis and kidney fibrosis.

### RELATED PATENT APPLICATIONS

[0001] This application claims the benefit of U.S. Provisional Application Ser. No. 61/388,572 filed Sep. 30, 2010 entitled “Modulation of TIMP1 and TIMP2 Expression” and which is incorporated herein by reference in its entirety and for all purposes.

### SEQUENCE LISTING

[0002] The instant application contains a Sequence Listing which is entitled 224-PCT1_ST25.txt, said ASCII copy, created on Aug. 24, 2011 and is 910 kb in size, is hereby incorporated by reference in its entirety.

### FIELD OF THE INVENTION

[0003] Provided herein are compositions and methods for modulating expression of TIMP1 and TIMP2.

### BACKGROUND OF THE INVENTION

[0004] Sato, Y., et al. disclose the administration of vitamin A-coupled liposomes to deliver small interfering RNA (siRNA) against gp46, the rat homolog of human heat shock protein 47, to liver cirrhosis rat animal models. Sato, Y., et al., Nature Biotechnology, vol. 26(4), p. 431-442 (2008).

[0005] Chen, J-J., et al. disclose transfecting human keloid samples with HSP-47-shRNA (small hairpin RNA) to examine proliferation of keloid fibroblast cells. Chen, J-J., et al., British Journal of Dermatology, vol. 156, p. 1188-1195 (2007).

[0006] PCT Patent Publication No. WO 2006/068232 discloses an astrocyte specific drug carrier which includes a retinoid derivative and/or a vitamin A analog.

[0007] PCT Patent Publication Nos. WO 2008/104978 and WO 2007/091269 disclose siRNA structures and compounds.

[0008] PCT Patent Publication No. WO 2011/072082 discloses double stranded RNA compounds targeting HSP47 (SERPINH1).

### SUMMARY OF THE INVENTION

[0009] Compositions, methods and kits for modulating expression of target genes are provided herein. In various aspects and embodiments, compositions, methods and kits provided herein modulate expression of tissue inhibitor of metalloproteinases 1 and tissue inhibitor of metalloproteinases 2 also known as TIMP1 and TIMP2, respectively. The compositions, methods and kits may involve use of nucleic acid molecules (for example, short interfering nucleic acid (siNA), short interfering RNA (siRNA), double-stranded RNA (dsRNA), micro-RNA (miRNA) or short hairpin RNA (shRNA)) that bind a nucleotide sequence (such as an mRNA sequence) encoding TIMP1 and TIMP2, for example, the mRNA coding sequence for human TIMP1 exemplified by SEQ ID NO:1 and the mRNA coding sequence for human TIMP2 exemplified by SEQ ID NO:2. In certain preferred embodiments, the compositions, methods and kits disclosed herein inhibit expression of TIMP1 or TIMP2. For example, siNA molecules (e.g., RISC length dsNA molecules or Dicer length dsNA molecules) are provided that down regulate, reduce or inhibit TIMP1 or TIMP2 expression. Also provided are compositions, methods and kits for treating and/or preventing diseases, conditions or disorders associated with TIMP1 and TIMP2, including organ specific fibrosis associated with at least one of brain, skin fibrosis, lung fibrosis, liver fibrosis, kidney fibrosis, heart fibrosis, vascular fibrosis, bone marrow fibrosis, eye fibrosis, intestinal fibrosis, vocal cord fibrosis or other fibrosis. Specific indications include liver fibrosis, cirrhosis, pulmonary fibrosis including Interstitial lung fibrosis (ILF), kidney fibrosis resulting from any condition (e.g., CKD including ESRD), peritoneal fibrosis, chronic hepatic damage, fibrillogenesis, fibrotic diseases in other organs, abnormal scarring (keloids) associated with all possible types of skin injury accidental and jatrogenic (operations); scleroderma; cardiofibrosis, failure of glaucoma filtering operation; brain fibrosis associated with cerebral infarction; and intestinal adhesions and Crohn's disease. The compounds are useful in treating organ specific indications including those shown in Table I infra.

[0010] In one aspect, provided are nucleic acid molecules (e.g., siNA molecules) in which (a) the nucleic acid molecule includes a sense strand (passenger strand) and an antisense strand (guide strand); (b) each strand of the nucleic acid molecule is independently 15 to 49 nucleotides in length; (c) a 15 to 49 nucleotide sequence of the antisense strand is complementary to a sequence of an mRNA encoding a human TIMP (e.g., SEQ ID NO: 1 or SEQ ID NO:2); and (d) a 15 to 49 nucleotide sequence of the sense strand is complementary to the sequence of the antisense strand and includes a 15 to 49 nucleotide sequence of an mRNA encoding human TIMP1 or TIMP2 (e.g., SEQ ID NO: 1 or SEQ ID NO:2, respectively). In various embodiments the sense and antisense strands generate a 15 to 49 base pair duplex.

[0011] In certain embodiments, the sequence of the antisense strand that is complementary to a sequence of an mRNA encoding human TIMP1 includes a sequence complimentary to a sequence between nucleotides 193-813 or 1-192; or 813-893 of SEQ ID NO: 1; or between nucleotides 1-200; or 800-893 of SEQ ID NO: 1.

[0012] In certain embodiments the sequence of the antisense comprises an antisense sequence set forth in any one of Tables A1-A8 or C. In preferred embodiments the sequence of the antisense comprises an antisense sequence set forth in Tables A3, A4, A7, A8, or C. In some embodiments the antisense and sense strands are selected from the sequence pairs set forth in Table A3 or Table A4. In some embodiments the antisense and sense strands are selected from the sequence pairs set forth in Table A7 or Table A8. In some embodiments the antisense and sense strands are selected from the sequence pairs set forth in Table C.

[0013] In certain embodiments, the sequence of the antisense strand that is complementary to a sequence of an mRNA encoding human TIMP2 includes a sequence complimentary to a sequence between nucleotides 303-962 or 1-303; or 962-3369; of SEQ ID NO: 2; or between nucleotides 1-350; or 950-3369 of SEQ ID NO: 2.

[0014] In certain embodiments the sequence of the antisense comprises an antisense sequence set forth in any one of Tables B1-B8 or D. In preferred embodiments the sequence of the antisense comprises an antisense sequence set forth in Tables B3, B4, B7, B8, D. In some embodiments the antisense and sense strands are selected from the sequence pairs set forth in Table B3 or Table B4. In some embodiments the antisense and sense strands are selected from the sequence pairs set forth in Table B7 or Table B8. In some embodiments the antisense and sense strands are selected from the sequence pairs set forth in Table D.

[0015] In some embodiments, the antisense strand includes a sequence that is complementary to a sequence of an mRNA encoding human TIMP1 corresponding to nucleotides 355-373 of SEQ ID NO: 1 or a portion thereof; or nucleotides 620-638 of SEQ ID NO: 1 or a portion thereof; or nucleotides 640-658 of SEQ ID NO: 1 or a portion thereof.

[0016] In some embodiments, the antisense strand includes a sequence that is complementary to a sequence of an mRNA encoding human TIMP2 corresponding to nucleotides 421-439 of SEQ ID NO: 2 or a portion thereof; or nucleotides 502-520 of SEQ ID NO: 2 or a portion thereof; or nucleotides 523-541 of SEQ ID NO: 2 or a portion thereof; or nucleotides 625-643 of SEQ ID NO: 2 or a portion thereof; or nucleotides 629-647 of SEQ ID NO: 2 or a portion thereof.

[0017] In some embodiments, the antisense strand of a nucleic acid molecule (e.g., a siNA molecule) as disclosed herein includes a sequence corresponding to any one of the antisense sequences shown in Table A1 or A5. In certain preferred embodiments the antisense strand and the strand are selected from the sequence pairs shown in Table A1. In certain preferred embodiments the antisense strand and the sense strand are selected from the sequence pairs shown in Table A5. In some preferred embodiments the antisense and sense strands are selected from the sequence pairs shown in Table A3 or Table A7.

[0018] In certain embodiments, the antisense strand of a nucleic acid molecule (e.g., a siNA molecule) as disclosed herein includes a sequence corresponding to any one of the antisense sequences shown in Table C.

[0019] In various embodiments of nucleic acid molecules (e.g., siNA molecules) as disclosed herein, the antisense strand may be 15 to 49 nucleotides in length (e.g., 15, 16, 17, 18, 19, 20, 21, 22, 23, 24, 25, 26, 27, 28, 29, 30, 31, 32, 33, 34, 35, 36, 37, 38, 39, 40, 41, 42, 43, 44, 45, 46, 47, 48 or 49 nucleotides in length); or 17-35 nucleotides in length; or 17-30 nucleotides in length; or 15-25 nucleotides in length; or 18-25 nucleotides in length; or 18-23 nucleotides in length; or 19-21 nucleotides in length; or 25-30 nucleotides in length; or 26-28 nucleotides in length. Similarly the sense strand of nucleic acid molecules (e.g., siNA molecules) as disclosed herein may be 15 to 49 nucleotides in length (e.g., 15, 16, 17, 18, 19, 20, 21, 22, 23, 24, 25, 26, 27, 28, 29, 30, 31, 32, 33, 34, 35, 36, 37, 38, 39, 40, 41, 42, 43, 44, 45, 46, 47, 48 or 49 nucleotides in length); or 17-35 nucleotides in length; or 17-30 nucleotides in length; or 15-25 nucleotides in length; or 18-25 nucleotides in length; or 18-23 nucleotides in length; or 19-21 nucleotides in length; or 25-30 nucleotides in length; or 26-28 nucleotides in length. The duplex region of the nucleic acid molecules (e.g., siNA molecules) as disclosed herein may be 15-49 nucleotides in length (e.g., about 15, 16, 17, 18, 19, 20, 21, 22, 23, 24, 25, 26, 27, 28, 29, 30, 31, 32, 33, 34, 35, 36, 37, 38, 39, 40, 41, 42, 43, 44, 45, 46, 47, 48 or 49 nucleotides in length); 18-40 nucleotides in length; or 15-35 nucleotides in length; or 15-30 nucleotides in length; or about 15-25 nucleotides in length; or 17-25 nucleotides in length; or 17-23 nucleotides in length; or 17-21 nucleotides in length; or 19-21 nucleotides in length, or 25-30 nucleotides in length; or 25-28 nucleotides in length. In some embodiments the duplex region of the nucleic acid molecules (e.g., siNA molecules) is 19 nucleotides in length.

[0020] In certain embodiments, the sense and antisense strands of a nucleic acid (e.g., an siNA nucleic acid molecule) as provided herein are separate polynucleotide strands. In some embodiments, the separate antisense and sense strands form a double stranded structure via hydrogen bonding, for example, Watson-Crick base pairing. In some embodiments the sense and antisense strands are two separate strands that are covalently linked to each other. In other embodiments, the sense and antisense strands are part of a single polynucleotide strand having both a sense and antisense region; in some preferred embodiments the polynucleotide strand has a hairpin structure.

[0021] In certain embodiments, the nucleic acid molecule (e.g., siNA molecule) is a double stranded nucleic acid (dsNA) molecule that is symmetrical with regard to overhangs, and has a blunt end on both ends. In other embodiments the nucleic acid molecule (e.g., siNA molecule) is a dsNA molecule that is symmetrical with regard to overhangs, and has an overhang on both ends of the dsNA molecule; preferably the molecule has overhangs of 1, 2, 3, 4, 5, 6, 7, or 8 nucleotides; preferably the molecule has 2 nucleotide overhangs. In some embodiments the overhangs are 5′ overhangs; in alternative embodiments the overhangs are 3′ overhangs. In certain embodiments, the overhang nucleotides are modified with modifications as disclosed herein. In some embodiments the overhang nucleotides are 2′-deoxyribonucleotides.

[0022] In some embodiments the molecules comprise non-nucleotide overhangs at one or more of the 5′ or 3′ terminus of the sense and/or antisense strands. Such non-nucleotide overhangs include abasic ribo- and deoxyribo-nucleotide moieties, alkyl moieties including C3-C3 moieties and amino carbon chains.

[0023] In certain preferred embodiments, the nucleic acid molecule (e.g., siNA molecule) is a dsNA molecule that is asymmetrical with regard to overhangs, and has a blunt end on one end of the molecule and an overhang on the other end of the molecule. In certain embodiments the overhang is 1, 2, 3, 4, 5, 6, 7, or 8 nucleotides; preferably the overhang is 2 nucleotides. In some preferred embodiments an asymmetrical dsNA molecule has a 3′-overhang (for example a two nucleotide 3′-overhang) on one side of a duplex occurring on the sense strand; and a blunt end on the other side of the molecule. In some preferred embodiments an asymmetrical dsNA molecule has a 5′-overhang (for example a two nucleotide 5′-overhang) on one side of a duplex occurring on the sense strand; and a blunt end on the other side of the molecule. In other preferred embodiments an asymmetrical dsNA molecule has a 3′-overhang (for example a two nucleotide 3′-overhang) on one side of a duplex occurring on the antisense strand; and a blunt end on the other side of the molecule. In some preferred embodiments an asymmetrical dsNA molecule has a 5′-overhang (for example a two nucleotide 5′-overhang) on one side of a duplex occurring on the antisense strand; and a blunt end on the other side of the molecule. In certain preferred embodiments, the overhangs are 2′-deoxyribonucleotides. Examples of siNA compounds having a terminal dTdT are found in Tables C and D, infra.

[0024] In some embodiments, the nucleic acid molecule (e.g., siNA molecule) has a hairpin structure (having the sense strand and antisense strand on one polynucleotide), with a loop structure on one end and a blunt end on the other end. In some embodiments, the nucleic acid molecule has a hairpin structure, with a loop structure on one end and an overhang end on the other end (for example a 1, 2, 3, 4, 5, 6, 7, or 8 nucleotide overhang); in certain embodiments, the overhang is a 3′-overhang; in certain embodiments the overhang is a 5′-overhang; in certain embodiments the overhang is on the sense strand; in certain embodiments the overhang is on the antisense strand.

[0025] The nucleic acid molecules (e.g., siNA molecule) disclosed herein may include one or more modifications or modified nucleotides such as described herein. For example, a nucleic acid molecule (e.g., siNA molecule) as provided herein may include a modified nucleotide having a modified sugar; a modified nucleotide having a modified nucleobase; or a modified nucleotide having a modified phosphate group. Similarly, a nucleic acid molecule (e.g., siNA molecule) as provided herein may include a modified phosphodiester backbone and/or may include a modified terminal phosphate group.

[0026] Nucleic acid molecules (e.g., siNA molecules) as provided may have one or more nucleotides that include a modified sugar moiety, for example as described herein. In some preferred embodiments the modified sugar moiety is selected from the group consisting of 2′-O-methyl, 2′-methoxyethoxy, 2′-deoxy, 2′-fluoro, 2′-allyl, 2′-O-[2-(methylamino)-2-oxoethyl], 4′-thio, 4′-(CH₂)₂—O-2′-bridge, 2′-locked nucleic acid, and 2′-O—(N-methylcarbamate).

[0027] Nucleic acid molecules (e.g., siNA molecules) as provided may have one or more modified nucleobase(s) for example as described herein, which preferably may be one selected from the group consisting of xanthine, hypoxanthine, 2-aminoadenine, 6-methyl and other alkyl derivatives of adenine and guanine, 2-propyl and other alkyl derivatives of adenine and guanine, 5-halouracil and cytosine, 5-propynyl uracil and cytosine, 6-azo uracil, cytosine and thymine, 5-uracil (pseudouracil), 4-thiouracil, 8-halo, amino, thiol, thioalkyl, hydroxyl and other 8-substituted adenines and guanines, 5-trifluoromethyl and other 5-substituted uracils and cytosines, 7-methylguanine, and acyclonucleotides.

[0028] Nucleic acid molecules (e.g., siNA molecules) as provided may have one or more modifications to the phosphodiester backbone, for example as described herein. In some preferred embodiments the phosphodiester bond is modified by substituting the phosphodiester bond with a phosphorothioate, 3′-(or -5′)deoxy-3′-(or -5′)thio-phosphorothioate, phosphorodithioate, phosphoroselenates, 3′-(or -5′)deoxy phosphinates, borano phosphates, 3′-(or -5′)deoxy-3′-(or 5′-)amino phosphoramidates, hydrogen phosphonates, borano phosphate esters, phosphoramidates, alkyl or aryl phosphonates and phosphotriester or phosphorus linkages.

[0029] In various embodiments, the provided nucleic acid molecules (e.g., siNA molecules) may include one or modifications in the sense strand but not the antisense strand; in other embodiments the provided nucleic acid molecules (e.g., siNA molecules) include one or more modifications in the antisense strand but not the sense strand; in yet other embodiments, the provided nucleic acid molecules (e.g., siNA molecules) include one or more modifications in the both the sense strand and the antisense strand.

[0030] In some embodiments in which the provided nucleic acid molecules (e.g., siNA molecules) have modifications, the sense strand includes a pattern of alternating modified and unmodified nucleotides, and/or the antisense strand includes a pattern of alternating modified and unmodified nucleotides; in some preferred versions of such embodiments the modification is a 2′-O-methyl (2′ methoxy or 2′OMe) sugar moiety. The pattern of alternating modified and unmodified nucleotides may start with a modified nucleotide at the 5′ end or 3′ end of one of the strands; for example the pattern of alternating modified and unmodified nucleotides may start with a modified nucleotide at the 5′ end or 3′ end of the sense strand and/or the pattern of alternating modified and unmodified nucleotides may start with a modified nucleotide at the 5′ end or 3′ end of the antisense strand. When both the antisense and sense strand include a pattern of alternating modified nucleotides, the pattern of modified nucleotides may be configured such that modified nucleotides in the sense strand are opposite modified nucleotides in the antisense strand; or there may be a phase shift in the pattern such that modified nucleotides of the sense strand are opposite unmodified nucleotides in the antisense strand and vice-versa.

[0031] The nucleic acid molecules (e.g., siNA molecules) as provided herein may include 1-3 (i.e., 1, 2 or 3) deoxyribonucleotides at the 3′ end of the sense and/or the antisense strand.

[0032] The nucleic acid molecules (e.g., siNA molecules) as provided herein may include a phosphate group at the 5′ end of the sense and/or the antisense strand.

[0033] In one aspect, provided are double stranded nucleic acid molecules having the structure (A1):

(A1) 5′(N)x - Z 3′ (antisense strand)
3′ Z′-(N′)y -z″ 5′ (sense strand)

wherein each of N and N′ is a nucleotide which may be unmodified or modified, or an unconventional moiety;
wherein each of (N)x and (N′)y is an oligonucleotide in which each consecutive N or N′ is joined to the next N or N′ by a covalent bond; wherein each of Z and Z′ is independently present or absent, but if present independently includes 1-5 consecutive nucleotides or non-nucleotide moieties or a combination thereof covalently attached at the 3′ terminus of the strand in which it is present;
wherein z″ may be present or absent, but if present is a capping moiety covalently attached at the 5′ terminus of (N′)y;
each of x and y is independently an integer from 18 to 40;
wherein the sequence of (N′)y has complementarity to the sequence of (N)x; and wherein (N)x includes an antisense sequence to SEQ ID NO:1 or to SEQ ID NO:2.

[0034] In some embodiments (N)x includes an antisense sequence to SEQ ID NO:1. In some embodiments (N)x includes an antisense oligonucleotide present in any one of Tables A1, A2, A3 or A4. In other embodiments (N)x is selected from an antisense oligonucleotide present in Tables A3 or A4.

[0035] In certain preferred embodiments, the antisense strand of a nucleic acid molecule (e.g., a siNA molecule) as disclosed herein includes a sequence corresponding to any one of the antisense sequences shown on Table A1. In certain preferred embodiments the antisense strand and the strand are selected from the sequence pairs shown in Table A2. In certain preferred embodiments the antisense strand and the strand are active in more than one species (human and at least one other species) and are selected from the sequence pairs shown in Table A2. In certain preferred embodiments the antisense strand and the strand are selected from the sequence pairs shown in Table A3, and preferably in Table A4. In some embodiments the antisense and sense strands are selected from the sequence pairs set forth in duplexes siTIMP1_p2; siTIMP1_p6; siTIMP1_p14; siTIMP1_p16; siTIMP1_p17; siTIMP1_p19; siTIMP1_p20; siTIMP1_p21; siTIMP1_p23; siTIMP1_p24; siTIMP1_p27; siTIMP1_p29; siTIMP1_p31; siTIMP1_p33; siTIMP1_p38; siTIMP1_p42; siTIMP1_p43; siTIMP1_p45; siTIMP1_p49; siTIMP1_p60; siTIMP1_p71; siTIMP1_p73; siTIMP1_p77; siTIMP1_p78; siTIMP1_p79; siTIMP1_p85; siTIMP1_p89; siTIMP1_p91; siTIMP1_p96; siTIMP1_p98; siTIMP1_p99 and siTIMP1_p108, shown in Table A3 infra.

[0036] In some embodiments the antisense and sense strands are selected from the sequence pairs set forth in siTIMP1_p2 (SEQ ID NOS:267 and 299); siTIMP1_p6 (SEQ ID NOS:268 and 300); siTIMP1_p14 (SEQ ID NOS:269 and 301); siTIMP1_p16 (SEQ ID NOS:270 and 302); siTIMP1_p17 (SEQ ID NOS:271 and 303); siTIMP1_p19 (SEQ ID NOS:272 and 304); siTIMP1_p20 (SEQ ID NOS:273 and 305); siTIMP1_p21 (SEQ ID NOS:274 and 306); siTIMP1_p23 (SEQ ID NOS:275 and 307; siTIMP1_p29 (278 and 310); siTIMP1_p33 (280 and 312); siTIMP1_p38 (SEQ ID NOS:281 and 313); siTIMP1_p42 (282 and 314); siTIMP1_p43 (SEQ ID NOS:283 and 315); siTIMP1_p45 (284 and 316); siTIMP1_p60 (SEQ ID NOS:286 and 318); siTIMP1_p71 (SEQ ID NOS:287 and 319); siTIMP1_p73 (SEQ ID NOS:288 and 320); siTIMP1_p78 (290 and 322); siTIMP1_p79 (SEQ ID NOS:291 and 323); siTIMP1_p85 (SEQ ID NOS:292 and 324); siTIMP1_p89 (SEQ ID NOS:293 and 325); siTIMP1_p91 (SEQ ID NOS:294 and 326); siTIMP1_p96 (SEQ ID NOS:295 and 327); siTIMP1_p98 (SEQ ID NOS:296 and 328); siTIMP1_p99 (SEQ ID NOS:297 and 329) and siTIMP1_p108 (SEQ ID NOS:298 and 330), shown in Table A4, infra.

[0037] In some embodiments the antisense and sense strands of a nucleic acid molecule (e.g., a siNA molecule) as disclosed herein includes the sequence pairs set forth in siTIMP1_p2 (SEQ ID NOS:267 and 299). In some embodiments the antisense and sense strands of a nucleic acid molecule (e.g., a siNA molecule) as disclosed herein includes the sequence pairs set forth in siTIMP1_p6 (SEQ ID NOS:268 and 300). In some embodiments the antisense and sense strands of a nucleic acid molecule (e.g., a siNA molecule) as disclosed herein includes the sequence pairs set forth in siTIMP1_p14 (SEQ ID NOS:269 and 301). In some embodiments the antisense and sense strands of a nucleic acid molecule (e.g., a siNA molecule) as disclosed herein includes the sequence pairs set forth in siTIMP1_p16 (SEQ ID NOS:270 and 302). In some embodiments the antisense and sense strands of a nucleic acid molecule (e.g., a siNA molecule) as disclosed herein includes the sequence pairs set forth in siTIMP1_p17 (SEQ ID NOS:271 and 303). In some embodiments the antisense and sense strands of a nucleic acid molecule (e.g., a siNA molecule) as disclosed herein includes the sequence pairs set forth in siTIMP1_p19 (SEQ ID NOS:272 and 304). In some embodiments the antisense and sense strands of a nucleic acid molecule (e.g., a siNA molecule) as disclosed herein includes the sequence pairs set forth in siTIMP1_p20 (SEQ ID NOS:273 and 305). In some embodiments the antisense and sense strands of a nucleic acid molecule (e.g., a siNA molecule) as disclosed herein includes the sequence pairs set forth in siTIMP1_p21 (SEQ ID NOS:274 and 306). In some embodiments the antisense and sense strands of a nucleic acid molecule (e.g., a siNA molecule) as disclosed herein includes the sequence pairs set forth in siTIMP1_p23 (SEQ ID NOS:275 and 307. In some embodiments the antisense and sense strands of a nucleic acid molecule (e.g., a siNA molecule) as disclosed herein includes the sequence pairs set forth in siTIMP1_p29 (278 and 310). In some embodiments the antisense and sense strands of a nucleic acid molecule (e.g., a siNA molecule) as disclosed herein includes the sequence pairs set forth in siTIMP1_p33 (280 and 312). In some embodiments the antisense and sense strands of a nucleic acid molecule (e.g., a siNA molecule) as disclosed herein includes the sequence pairs set forth in siTIMP1_p38 (SEQ ID NOS:281 and 313). In some embodiments the antisense and sense strands of a nucleic acid molecule (e.g., a siNA molecule) as disclosed herein includes the sequence pairs set forth in siTIMP1_p42 (282 and 314). In some embodiments the antisense and sense strands of a nucleic acid molecule (e.g., a siNA molecule) as disclosed herein includes the sequence pairs set forth in siTIMP1_p43 (SEQ ID NOS:283 and 315). In some embodiments the antisense and sense strands of a nucleic acid molecule (e.g., a siNA molecule) as disclosed herein includes the sequence pairs set forth in siTIMP1_p45 (284 and 316). In some embodiments the antisense and sense strands of a nucleic acid molecule (e.g., a siNA molecule) as disclosed herein includes the sequence pairs set forth in siTIMP1_p60 (SEQ ID NOS:286 and 318). In some embodiments the antisense and sense strands of a nucleic acid molecule (e.g., a siNA molecule) as disclosed herein includes the sequence pairs set forth in siTIMP1_p71 (SEQ ID NOS:287 and 319). In some embodiments the antisense and sense strands of a nucleic acid molecule (e.g., a siNA molecule) as disclosed herein includes the sequence pairs set forth in siTIMP1_p73 (SEQ ID NOS:288 and 320). In some embodiments the antisense and sense strands of a nucleic acid molecule (e.g., a siNA molecule) as disclosed herein includes the sequence pairs set forth in siTIMP1_p78 (290 and 322). In some embodiments the antisense and sense strands of a nucleic acid molecule (e.g., a siNA molecule) as disclosed herein includes the sequence pairs set forth in siTIMP1_p79 (SEQ ID NOS:291 and 323). In some embodiments the antisense and sense strands of a nucleic acid molecule (e.g., a siNA molecule) as disclosed herein includes the sequence pairs set forth in siTIMP1_p85 (SEQ ID NOS:292 and 324). In some embodiments the antisense and sense strands of a nucleic acid molecule (e.g., a siNA molecule) as disclosed herein includes the sequence pairs set forth in siTIMP1_p89 (SEQ ID NOS:293 and 325). In some embodiments the antisense and sense strands of a nucleic acid molecule (e.g., a siNA molecule) as disclosed herein includes the sequence pairs set forth in siTIMP1_p91 (SEQ ID NOS:294 and 326). In some embodiments the antisense and sense strands of a nucleic acid molecule (e.g., a siNA molecule) as disclosed herein includes the sequence pairs set forth in siTIMP1_p96 (SEQ ID NOS:295 and 327). In some embodiments the antisense and sense strands of a nucleic acid molecule (e.g., a siNA molecule) as disclosed herein includes the sequence pairs set forth in siTIMP1_p98 (SEQ ID NOS:296 and 328). In some embodiments the antisense and sense strands of a nucleic acid molecule (e.g., a siNA molecule) as disclosed herein includes the sequence pairs set forth in siTIMP1_p99 (SEQ ID NOS:297 and 329). In some embodiments the antisense and sense strands of a nucleic acid molecule (e.g., a siNA molecule) as disclosed herein includes the sequence pairs set forth in siTIMP1_p108 (SEQ ID NOS:298 and 330), shown in Table A4.

[0038] In some preferred embodiments the nucleic acid molecule (e.g., a siNA molecule) as disclosed herein includes the antisense strand and the sense strand of a sequence pair set forth in siTIMP1_p2 (SEQ ID NOS:267 and 299). In some preferred embodiments the nucleic acid molecule (e.g., a siNA molecule) as disclosed herein includes the antisense strand and the sense strand of a sequence pair set forth in siTIMP1_p6 (SEQ ID NOS:268 and 300). In some preferred embodiments the nucleic acid molecule (e.g., a siNA molecule) as disclosed herein includes the antisense strand and the sense strand of a sequence pair set forth in siTIMP1_p16 (SEQ ID NOS:270 and 302). In some preferred embodiments the nucleic acid molecule (e.g., a siNA molecule) as disclosed herein includes the antisense strand and the sense strand of a sequence pair set forth in siTIMP1_p17 (SEQ ID NOS:271 and 303). In some preferred embodiments the nucleic acid molecule (e.g., a siNA molecule) as disclosed herein includes the antisense strand and the sense strand of a sequence pair set forth in siTIMP1_p19 (SEQ ID NOS:272 and 304). I In some preferred embodiments the nucleic acid molecule (e.g., a siNA molecule) as disclosed herein includes the antisense strand and the sense strand of a sequence pair set forth in siTIMP1_p20 (SEQ ID NOS:273 and 305). In some preferred embodiments the nucleic acid molecule (e.g., a siNA molecule) as disclosed herein includes the antisense strand and the sense strand of a sequence pair set forth in siTIMP1_p21 (SEQ ID NOS:274 and 306). In some preferred embodiments the nucleic acid molecule (e.g., a siNA molecule) as disclosed herein includes the antisense strand and the sense strand of a sequence pair set forth in siTIMP1_p38 (SEQ ID NOS:281 and 313).

[0039] In some embodiments (N)x includes an antisense sequence to SEQ ID NO:2. In some embodiments (N)x includes an antisense oligonucleotide present in any one of Tables B1, B2, B3 or B4. In other embodiments (N)x is selected from an antisense oligonucleotide present in Tables B3 or B4.

[0040] In certain preferred embodiments, the antisense strand of a nucleic acid molecule (e.g., a siNA molecule) as disclosed herein includes a sequence corresponding to any one of the antisense sequences shown on Table B1. In certain preferred embodiments the antisense strand and the strand are selected from the sequence pairs shown in Table B2. In certain preferred embodiments the antisense strand and the strand are active in more than one species (human and at least one other species) and are selected from the sequence pairs shown in Table B2. In certain preferred embodiments the antisense strand and the strand are selected from the sequence pairs shown in Table B3, and preferably in Table B4.

[0041] In some embodiments the antisense and sense strands are selected from the sequence pairs set forth in siTIMP2_p4; siTIMP2_p16; siTIMP2_p17; siTIMP2_p18; siTIMP2_p20; siTIMP2_p24; siTIMP2_p25; siTIMP2_p27; siTIMP2_p29; siTIMP2_p30; siTIMP2_p33; siTIMP2_p35; siTIMP2_p37; siTIMP2_p38; siTIMP2_p39; siTIMP2_p40; siTIMP2_p41; siTIMP2_p44; siTIMP2_p46; siTIMP2_p51; siTIMP2_p55; siTIMP2_p61; siTIMP2_p62; siTIMP2_p64; siTIMP2_p65; siTIMP2_p67; siTIMP2_p68; siTIMP2_p69; siTIMP2_p71; siTIMP2_p75; siTIMP2_p76; siTIMP2_p78; siTIMP2_p79; siTIMP2_p82; siTIMP2_p83; siTIMP2_p84; siTIMP2_p85; siTIMP2_p86; siTIMP2_p87; siTIMP2_p88; siTIMP2_p89; siTIMP2_p90; siTIMP2_p91; siTIMP2_p92; siTIMP2_p93; siTIMP2_p94; siTIMP2_p95; siTIMP2_p96; siTIMP2_p97; siTIMP2_p98; siTIMP2_p99; siTIMP2_p100; and siTIMP2_p101 and siTIMP2_p102, shown in Table B3, infra.

[0042] In some embodiments the antisense and sense strands are selected from the sequence pairs set forth in siTIMP2_p27 (SEQ ID NOS:2478 and 2531); siTIMP2_p29 (SEQ ID NOS:2479 and 2532); siTIMP2_p30 (SEQ ID NOS:2480 and 2533); siTIMP2_p39 (SEQ ID NOS:2485 and 2538); siTIMP2_p40 (SEQ ID NOS:2486 and 2539); siTIMP2_p41 (SEQ ID NOS:2487 and 2540); siTIMP2_p46 (SEQ ID NOS:2489 and 2542); siTIMP2_p55 (SEQ ID NOS:2491 and 2544); siTIMP2_p62 (SEQ ID NOS:2493 and 2546); siTIMP2_p68 (SEQ ID NOS:2497 and 2550); siTIMP2_p69 (SEQ ID NOS:2498 and 2551); siTIMP2_p71 (SEQ ID NOS:2499 and 2552); siTIMP2_p76 (SEQ ID NOS:2501 and 2554); siTIMP2_p78 (SEQ ID NOS:2502 and 2555); siTIMP2_p89 (SEQ ID NOS:2511 and 2564); siTIMP2_p91 (SEQ ID NOS:2513 and 2566); siTIMP2_p93 (SEQ ID NOS:2515 and 2568); siTIMP2_p95 (SEQ ID NOS:2517 and 2570); siTIMP2_p97 (SEQ ID NOS:2519 and 2572); siTIMP2_p98 (SEQ ID NOS:2520 and 2573); and siTIMP2_p100 (SEQ ID NOS:2522 and 2575), shown in Table B4, infra

[0043] In some embodiments the antisense and sense strands of a nucleic acid molecule (e.g., a siNA molecule) as disclosed herein includes the sequence pairs set forth in siTIMP2_p27 (SEQ ID NOS:2478 and 2531). In some embodiments the antisense and sense strands of a nucleic acid molecule (e.g., a siNA molecule) as disclosed herein includes the sequence pairs set forth in siTIMP2_p29 (SEQ ID NOS:2479 and 2532). In some embodiments the antisense and sense strands of a nucleic acid molecule (e.g., a siNA molecule) as disclosed herein includes the sequence pairs set forth in siTIMP2_p30 (SEQ ID NOS:2480 and 2533). In some embodiments the antisense and sense strands of a nucleic acid molecule (e.g., a siNA molecule) as disclosed herein includes the sequence pairs set forth in siTIMP2_p39 (SEQ ID NOS:2485 and 2538). In some embodiments the antisense and sense strands of a nucleic acid molecule (e.g., a siNA molecule) as disclosed herein includes the sequence pairs set forth in siTIMP2_p40 (SEQ ID NOS:2486 and 2539). In some embodiments the antisense and sense strands of a nucleic acid molecule (e.g., a siNA molecule) as disclosed herein includes the sequence pairs set forth in siTIMP2_p41 (SEQ ID NOS:2487 and 2540). In some embodiments the antisense and sense strands of a nucleic acid molecule (e.g., a siNA molecule) as disclosed herein includes the sequence pairs set forth in siTIMP2_p46 (SEQ ID NOS:2489 and 2542). In some embodiments the antisense and sense strands of a nucleic acid molecule (e.g., a siNA molecule) as disclosed herein includes the sequence pairs set forth in siTIMP2_p55 (SEQ ID NOS:2491 and 2544). In some embodiments the antisense and sense strands of a nucleic acid molecule (e.g., a siNA molecule) as disclosed herein includes the sequence pairs set forth in siTIMP2_p62 (SEQ ID NOS:2493 and 2546). In some embodiments the antisense and sense strands of a nucleic acid molecule (e.g., a siNA molecule) as disclosed herein includes the sequence pairs set forth in siTIMP2_p68 (SEQ ID NOS:2497 and 2550). In some embodiments the antisense and sense strands of a nucleic acid molecule (e.g., a siNA molecule) as disclosed herein includes the sequence pairs set forth in siTIMP2_p69 (SEQ ID NOS:2498 and 2551). In some embodiments the antisense and sense strands of a nucleic acid molecule (e.g., a siNA molecule) as disclosed herein includes the sequence pairs set forth in siTIMP2_p71 (SEQ ID NOS:2499 and 2552). In some embodiments the antisense and sense strands of a nucleic acid molecule (e.g., a siNA molecule) as disclosed herein includes the sequence pairs set forth in siTIMP2_p76 (SEQ ID NOS:2501 and 2554). In some embodiments the antisense and sense strands of a nucleic acid molecule (e.g., a siNA molecule) as disclosed herein includes the sequence pairs set forth in siTIMP2_p78 (SEQ ID NOS:2502 and 2555). In some embodiments the antisense and sense strands of a nucleic acid molecule (e.g., a siNA molecule) as disclosed herein includes the sequence pairs set forth in siTIMP2_p89 (SEQ ID NOS:2511 and 2564). In some embodiments the antisense and sense strands of a nucleic acid molecule (e.g., a siNA molecule) as disclosed herein includes the sequence pairs set forth in siTIMP2_p91 (SEQ ID NOS:2513 and 2566). In some embodiments the antisense and sense strands of a nucleic acid molecule (e.g., a siNA molecule) as disclosed herein includes the sequence pairs set forth in siTIMP2_p93 (SEQ ID NOS:2515 and 2568). In some embodiments the antisense and sense strands of a nucleic acid molecule (e.g., a siNA molecule) as disclosed herein includes the sequence pairs set forth in siTIMP2_p95 (SEQ ID NOS:2517 and 2570). In some embodiments the antisense and sense strands of a nucleic acid molecule (e.g., a siNA molecule) as disclosed herein includes the sequence pairs set forth in siTIMP2_p97 (SEQ ID NOS:2519 and 2572). In some embodiments the antisense and sense strands of a nucleic acid molecule (e.g., a siNA molecule) as disclosed herein includes the sequence pairs set forth in siTIMP2_p98 (SEQ ID NOS:2520 and 2573). In some embodiments the antisense and sense strands of a nucleic acid molecule (e.g., a siNA molecule) as disclosed herein includes the sequence pairs set forth in siTIMP2_p100 (SEQ ID NOS:2522 and 2575). In some embodiments the antisense and sense strands of a nucleic acid molecule (e.g., a siNA molecule) as disclosed herein includes the sequence pairs set forth in siTIMP2_p102 (SEQ ID NOS:1007 and 1622).

[0044] In some embodiments the covalent bond joining each consecutive N or N′ is a phosphodiester bond.

[0045] In some embodiments x=y and each of x and y is 19, 20, 21, 22 or 23. In various embodiments x=y=19. In some embodiments the antisense and sense strands form a duplex by base pairing.

[0046] According to one embodiment provided are modified nucleic acid molecules having a structure (A2) set forth below:

| | | |
|---|---|---|
| (A2) | 5′ N1-(N)x-Z | 3′ (antisense strand) |
| | 3′ Z′-N2-(N′)y-z″ | 5′ (sense strand) |

wherein each of N2, N and N′ is independently an unmodified or modified nucleotide, or an unconventional moiety;
wherein each of (N)x and (N′)y is an oligonucleotide in which each consecutive N or N′ is joined to the adjacent N or N′ by a covalent bond;
wherein each of x and y is independently an integer of from 17 to 39;
wherein the sequence of (N′)y has complementarity to the sequence of (N)x and (N)x has complementarity to a consecutive sequence in a target mRNA selected from SEQ ID NO:1 and SEQ ID NO:2;
wherein N1 is covalently bound to (N)x and is mismatched to SEQ ID NO:1 or to SEQ ID NO:2,
wherein N1 is a moiety selected from the group consisting of uridine, modified uridine, ribothymidine, modified ribothymidine, deoxyribothymidine, modified deoxyribothymidine, riboadenine, modified riboadenine, deoxyriboadenine or modified deoxyriboadenine;
wherein N1 and N2 form a base pair;
wherein each of Z and Z′ is independently present or absent, but if present is independently 1-5 consecutive nucleotides or non-nucleotide moieties or a combination thereof covalently attached at the 3′ terminus of the strand in which it is present; and
wherein z″ may be present or absent, but if present is a capping moiety covalently attached at the 5′ terminus of (N′)y.

[0047] Molecules covered by the description of Structure A2 are also referred to herein as “18+1” or “18+1 mer”. In some embodiments the N2-(N′)y and N1-(N)x oligonucleotide strands useful in generating dsRNA compounds are presented in Tables A5, A6, A7, A8, B5, B6, B7 or B8. In some embodiments (N)x has complementarity to a consecutive sequence in SEQ ID NO:1 (human TIMP1 mRNA). In some embodiments (N)x includes an antisense oligonucleotide present in any one of Tables A5, A6, A7, and A8. In some embodiments x=y=18 and N1-(N)x includes an antisense oligonucleotide present in any one of Tables A3 or A4. In some embodiments x=y=19 or x=y=20. In certain preferred embodiments x=y=18.

[0048] In certain preferred embodiments, the antisense strand of a nucleic acid molecule (e.g., a siNA molecule) as disclosed herein includes a sequence corresponding to any one of the antisense sequences shown on Table A5. In certain preferred embodiments the antisense strand and the strand are selected from the sequence pairs shown in Table A6. In certain preferred embodiments the antisense strand and the strand are active in more than one species (human and at least one other species) and are selected from the sequence pairs shown in Table A6. In certain preferred embodiments the antisense strand and the strand are selected from the sequence pairs shown in Table A7, and preferably in Table A8.

[0049] In some embodiments the antisense and sense strands are selected from the sequence pairs set forth in siTIMP1_p1; siTIMP1_p3; siTIMP1_p4; siTIMP1_p5; siTIMP1_p7; siTIMP1_p8; siTIMP1_p9; siTIMP1_p10; siTIMP1_p11; siTIMP1_p12; siTIMP1_p13; siTIMP1_p15; siTIMP1_p18; siTIMP1_p22; siTIMP1_p25; siTIMP1_p26; siTIMP1_p28; siTIMP1_p30; siTIMP1_p32; siTIMP1_p34; siTIMP1_p35; siTIMP1_p36; siTIMP1_p37; siTIMP1_p39; siTIMP1_p40; siTIMP1_p41; siTIMP1_p44; siTIMP1_p46; siTIMP1_p47; siTIMP1_p48; siTIMP1_p50; siTIMP1_p51; siTIMP1_p52; siTIMP1_p53; siTIMP1_p54; siTIMP1_p55; siTIMP1_p56; siTIMP1_p57; siTIMP1_p58; siTIMP1_p59; siTIMP1_p61; siTIMP1_p62; siTIMP1_p63; siTIMP1_p64; siTIMP1_p65; siTIMP1_p66; siTIMP1_p67; siTIMP1_p68; siTIMP1_p69; siTIMP1_p70; siTIMP1_p72; siTIMP1_p74; siTIMP1_p75; siTIMP1_p76; siTIMP1_p80; siTIMP1_p81; siTIMP1_p82; siTIMP1_p83; siTIMP1_p84; siTIMP1_p86; siTIMP1_p87; siTIMP1_p88; siTIMP1_p90; siTIMP1_p92; siTIMP1_p93; siTIMP1_p94; siTIMP1_p95; siTIMP1_p97; siTIMP1_p100; siTIMP1_p101; siTIMP1_p102; siTIMP1_p103; siTIMP1_p104; siTIMP1_p105; siTIMP1_p106; siTIMP1_p109; siTIMP1_p110; siTIMP1_p111; siTIMP1_p112; siTIMP1_p113 and siTIMP1_p114, shown in Table A7, infra.

[0050] In some embodiments the antisense and sense strands are selected from the sequence pairs set forth in siTIMP1_p1 (SEQ ID NOS:845 and 926); siTIMP1_p4 (SEQ ID NOS:847 and 928; siTIMP1_p5 (SEQ ID NOS:848 and 929); siTIMP1_p7 (SEQ ID NOS:849 and 930); siTIMP1_p8 (SEQ ID NOS:850 and 931); siTIMP1_p9 (SEQ ID NOS:850 and 931); siTIMP1_p10 (SEQ ID NOS:852 and 933); siTIMP1_p11 (SEQ ID NOS:853 and 934); siTIMP1_p12 (SEQ ID NOS:854 and 935); siTIMP1_p13 (SEQ ID NOS:855 and 936); siTIMP1_p15 (SEQ ID NOS:856 and 937); siTIMP1_p18 (SEQ ID NOS:857 and 938); siTIMP1_p22 (SEQ ID NOS:858 and 939); siTIMP1_p26 (SEQ ID NOS:860 and 941); siTIMP1_p36 (SEQ ID NOS:866 and 947); siTIMP1_p37 (SEQ ID NOS:867 and 948); siTIMP1_p39 (SEQ ID NOS:868 and 949); siTIMP1_p40 (SEQ ID NOS:869 and 950); siTIMP1_p41 (SEQ ID NOS:870 and 951); siTIMP1_p44 (SEQ ID NOS:871 and 952); siTIMP1_p47 (SEQ ID NOS:873 and 954); siTIMP1_p48 (SEQ ID NOS:874 and 955); siTIMP1_p50 (SEQ ID NOS:875 and 956); siTIMP1_p51 (SEQ ID NOS:876 and 957); siTIMP1_p52 (SEQ ID NOS:877 and 958); siTIMP1_p55 (SEQ ID NOS:880 and 961); siTIMP1_p56 (SEQ ID NOS:881 and 962); siTIMP1_p58 (SEQ ID NOS:883 and 964); siTIMP1_p61 (SEQ ID NOS:885 and 966); siTIMP1_p64 (SEQ ID NOS:888 and 969); siTIMP1_p66 (SEQ ID NOS:890 and 971); siTIMP1_p68 (SEQ ID NOS:892 and 973); siTIMP1_p70 (SEQ ID NOS:894 and 975); siTIMP1_p75 (SEQ ID NOS:897 and 978); siTIMP1_p83 (SEQ ID NOS:902 and 983); siTIMP1_p86 (SEQ ID NOS:904 and 985); siTIMP1_p88 (SEQ ID NOS:906 and 987); siTIMP1_p92 (SEQ ID NOS:908 and 989); siTIMP1_p93 (SEQ ID NOS:909 and 990); siTIMP1_p95 (SEQ ID NOS:911 and 992); siTIMP1_p97 (SEQ ID NOS:912 and 993); siTIMP1_p102 (SEQ ID NOS:915 and 996); siTIMP1_p104 (SEQ ID NOS:917 and 998); siTIMP1_p105 (SEQ ID NOS:918 and 999); siTIMP1_p106 (SEQ ID NOS:919 and 1000); siTIMP1_p110 (SEQ ID NOS:921 and 1002) and siTIMP1_p112 (SEQ ID NOS:923 and 1004), shown in Table A8, infra.

[0051] In some embodiments the antisense and sense strands of a nucleic acid molecule (e.g., a siNA molecule) as disclosed herein includes the sequence pairs set forth in siTIMP1_p1 (SEQ ID NOS:845 and 926). In some embodiments the antisense and sense strands of a nucleic acid molecule (e.g., a siNA molecule) as disclosed herein includes the sequence pairs set forth in siTIMP1_p4 (SEQ ID NOS:847 and 928. In some embodiments the antisense and sense strands of a nucleic acid molecule (e.g., a siNA molecule) as disclosed herein includes the sequence pairs set forth in siTIMP1_p5 (SEQ ID NOS:848 and 929). In some embodiments the antisense and sense strands of a nucleic acid molecule (e.g., a siNA molecule) as disclosed herein includes the sequence pairs set forth in siTIMP1_p7 (SEQ ID NOS:849 and 930). In some embodiments the antisense and sense strands of a nucleic acid molecule (e.g., a siNA molecule) as disclosed herein includes the sequence pairs set forth in siTIMP1_p8 (SEQ ID NOS:850 and 931). In some embodiments the antisense and sense strands of a nucleic acid molecule (e.g., a siNA molecule) as disclosed herein includes the sequence pairs set forth in siTIMP1_p9 (SEQ ID NOS:850 and 931). In some embodiments the antisense and sense strands of a nucleic acid molecule (e.g., a siNA molecule) as disclosed herein includes the sequence pairs set forth in siTIMP1_p10 (SEQ ID NOS:852 and 933). In some embodiments the antisense and sense strands of a nucleic acid molecule (e.g., a siNA molecule) as disclosed herein includes the sequence pairs set forth in siTIMP1_p11 (SEQ ID NOS:853 and 934). In some embodiments the antisense and sense strands of a nucleic acid molecule (e.g., a siNA molecule) as disclosed herein includes the sequence pairs set forth in siTIMP1_p12 (SEQ ID NOS:854 and 935). In some embodiments the antisense and sense strands of a nucleic acid molecule (e.g., a siNA molecule) as disclosed herein includes the sequence pairs set forth in siTIMP1_p13 (SEQ ID NOS:855 and 936). In some embodiments the antisense and sense strands of a nucleic acid molecule (e.g., a siNA molecule) as disclosed herein includes the sequence pairs set forth in siTIMP1_p15 (SEQ ID NOS:856 and 937). In some embodiments the antisense and sense strands of a nucleic acid molecule (e.g., a siNA molecule) as disclosed herein includes the sequence pairs set forth in siTIMP1_p18 (SEQ ID NOS:857 and 938). In some embodiments the antisense and sense strands of a nucleic acid molecule (e.g., a siNA molecule) as disclosed herein includes the sequence pairs set forth in siTIMP1_p22 (SEQ ID NOS:858 and 939). In some embodiments the antisense and sense strands of a nucleic acid molecule (e.g., a siNA molecule) as disclosed herein includes the sequence pairs set forth in siTIMP1_p26 (SEQ ID NOS:860 and 941). In some embodiments the antisense and sense strands of a nucleic acid molecule (e.g., a siNA molecule) as disclosed herein includes the sequence pairs set forth in siTIMP1_p36 (SEQ ID NOS:866 and 947). In some embodiments the antisense and sense strands of a nucleic acid molecule (e.g., a siNA molecule) as disclosed herein includes the sequence pairs set forth in siTIMP1_p37 (SEQ ID NOS:867 and 948). In some embodiments the antisense and sense strands of a nucleic acid molecule (e.g., a siNA molecule) as disclosed herein includes the sequence pairs set forth in siTIMP1_p39 (SEQ ID NOS:868 and 949). In some embodiments the antisense and sense strands of a nucleic acid molecule (e.g., a siNA molecule) as disclosed herein includes the sequence pairs set forth in siTIMP1_p40 (SEQ ID NOS:869 and 950). In some embodiments the antisense and sense strands of a nucleic acid molecule (e.g., a siNA molecule) as disclosed herein includes the sequence pairs set forth in siTIMP1_p41 (SEQ ID NOS:870 and 951). In some embodiments the antisense and sense strands of a nucleic acid molecule (e.g., a siNA molecule) as disclosed herein includes the sequence pairs set forth in siTIMP1_p44 (SEQ ID NOS:871 and 952). In some embodiments the antisense and sense strands of a nucleic acid molecule (e.g., a siNA molecule) as disclosed herein includes the sequence pairs set forth in siTIMP1_p47 (SEQ ID NOS:873 and 954). In some embodiments the antisense and sense strands of a nucleic acid molecule (e.g., a siNA molecule) as disclosed herein includes the sequence pairs set forth in siTIMP1_p48 (SEQ ID NOS:874 and 955). In some embodiments the antisense and sense strands of a nucleic acid molecule (e.g., a siNA molecule) as disclosed herein includes the sequence pairs set forth in siTIMP1_p50 (SEQ ID NOS:875 and 956). In some embodiments the antisense and sense strands of a nucleic acid molecule (e.g., a siNA molecule) as disclosed herein includes the sequence pairs set forth in siTIMP1_p51 (SEQ ID NOS:876 and 957). In some embodiments the antisense and sense strands of a nucleic acid molecule (e.g., a siNA molecule) as disclosed herein includes the sequence pairs set forth in siTIMP1_p52 (SEQ ID NOS:877 and 958). In some embodiments the antisense and sense strands of a nucleic acid molecule (e.g., a siNA molecule) as disclosed herein includes the sequence pairs set forth in siTIMP1_p55 (SEQ ID NOS:880 and 961). In some embodiments the antisense and sense strands of a nucleic acid molecule (e.g., a siNA molecule) as disclosed herein includes the sequence pairs set forth in siTIMP1_p56 (SEQ ID NOS:881 and 962). In some embodiments the antisense and sense strands of a nucleic acid molecule (e.g., a siNA molecule) as disclosed herein includes the sequence pairs set forth in siTIMP1_p58 (SEQ ID NOS:883 and 964). In some embodiments the antisense and sense strands of a nucleic acid molecule (e.g., a siNA molecule) as disclosed herein includes the sequence pairs set forth in siTIMP1_p61 (SEQ ID NOS:885 and 966). In some embodiments the antisense and sense strands of a nucleic acid molecule (e.g., a siNA molecule) as disclosed herein includes the sequence pairs set forth in siTIMP1_p64 (SEQ ID NOS:888 and 969). In some embodiments the antisense and sense strands of a nucleic acid molecule (e.g., a siNA molecule) as disclosed herein includes the sequence pairs set forth in siTIMP1_p66 (SEQ ID NOS:890 and 971). In some embodiments the antisense and sense strands of a nucleic acid molecule (e.g., a siNA molecule) as disclosed herein includes the sequence pairs set forth in siTIMP1_p68 (SEQ ID NOS:892 and 973). In some embodiments the antisense and sense strands of a nucleic acid molecule (e.g., a siNA molecule) as disclosed herein includes the sequence pairs set forth in siTIMP1_p70 (SEQ ID NOS:894 and 975). In some embodiments the antisense and sense strands of a nucleic acid molecule (e.g., a siNA molecule) as disclosed herein includes the sequence pairs set forth in siTIMP1_p75 (SEQ ID NOS:897 and 978). In some embodiments the antisense and sense strands of a nucleic acid molecule (e.g., a siNA molecule) as disclosed herein includes the sequence pairs set forth in siTIMP1_p83 (SEQ ID NOS:902 and 983). In some embodiments the antisense and sense strands of a nucleic acid molecule (e.g., a siNA molecule) as disclosed herein includes the sequence pairs set forth in siTIMP1_p86 (SEQ ID NOS:904 and 985). In some embodiments the antisense and sense strands of a nucleic acid molecule (e.g., a siNA molecule) as disclosed herein includes the sequence pairs set forth in siTIMP1_p88 (SEQ ID NOS:906 and 987). In some embodiments the antisense and sense strands of a nucleic acid molecule (e.g., a siNA molecule) as disclosed herein includes the sequence pairs set forth in siTIMP1_p92 (SEQ ID NOS:908 and 989). In some embodiments the antisense and sense strands of a nucleic acid molecule (e.g., a siNA molecule) as disclosed herein includes the sequence pairs set forth in siTIMP1_p93 (SEQ ID NOS:909 and 990). In some embodiments the antisense and sense strands of a nucleic acid molecule (e.g., a siNA molecule) as disclosed herein includes the sequence pairs set forth in siTIMP1_p95 (SEQ ID NOS:911 and 992). In some embodiments the antisense and sense strands of a nucleic acid molecule (e.g., a siNA molecule) as disclosed herein includes the sequence pairs set forth in siTIMP1_p97 (SEQ ID NOS:912 and 993). In some embodiments the antisense and sense strands of a nucleic acid molecule (e.g., a siNA molecule) as disclosed herein includes the sequence pairs set forth in siTIMP1_p102 (SEQ ID NOS:915 and 996). In some embodiments the antisense and sense strands of a nucleic acid molecule (e.g., a siNA molecule) as disclosed herein includes the sequence pairs set forth in siTIMP1_p104 (SEQ ID NOS:917 and 998). In some embodiments the antisense and sense strands of a nucleic acid molecule (e.g., a siNA molecule) as disclosed herein includes the sequence pairs set forth in siTIMP1_p105 (SEQ ID NOS:918 and 999). In some embodiments the antisense and sense strands of a nucleic acid molecule (e.g., a siNA molecule) as disclosed herein includes the sequence pairs set forth in siTIMP1_p106 (SEQ ID NOS:919 and 1000). In some embodiments the antisense and sense strands of a nucleic acid molecule (e.g., a siNA molecule) as disclosed herein includes the sequence pairs set forth in siTIMP1_p110 (SEQ ID NOS:921 and 1002). In some embodiments the antisense and sense strands of a nucleic acid molecule (e.g., a siNA molecule) as disclosed herein includes the sequence pairs set forth in siTIMP1_p112 (SEQ ID NOS:923 and 1004).

[0052] In some preferred embodiments the nucleic acid molecule (e.g., a siNA molecule) as disclosed herein includes the antisense strand and the sense strand of a sequence pair set forth in siTIMP1_p1 (SEQ ID NOS:845 and 926). In some preferred embodiments the nucleic acid molecule (e.g., a siNA molecule) as disclosed herein includes the antisense strand and the sense strand of a sequence pair set forth in siTIMP1_p4 (SEQ ID NOS:847 and 928. In some preferred embodiments the nucleic acid molecule (e.g., a siNA molecule) as disclosed herein includes the antisense strand and the sense strand of a sequence pair set forth in siTIMP1_p5 (SEQ ID NOS:848 and 929). In some preferred embodiments the nucleic acid molecule (e.g., a siNA molecule) as disclosed herein includes the antisense strand and the sense strand of a sequence pair set forth in siTIMP1_p7 (SEQ ID NOS:849 and 930). In some preferred embodiments the nucleic acid molecule (e.g., a siNA molecule) as disclosed herein includes the antisense strand and the sense strand of a sequence pair set forth in siTIMP1_p9 (SEQ ID NOS:850 and 931). In some preferred embodiments the nucleic acid molecule (e.g., a siNA molecule) as disclosed herein includes the antisense strand and the sense strand of a sequence pair set forth in siTIMP1_p10 (SEQ ID NOS:852 and 933). In some preferred embodiments the nucleic acid molecule (e.g., a siNA molecule) as disclosed herein includes the antisense strand and the sense strand of a sequence pair set forth in siTIMP1_p11 (SEQ ID NOS:853 and 934). In some preferred embodiments the nucleic acid molecule (e.g., a siNA molecule) as disclosed herein includes the antisense strand and the sense strand of a sequence pair set forth in siTIMP1_p12 (SEQ ID NOS:854 and 935). In some preferred embodiments the nucleic acid molecule (e.g., a siNA molecule) as disclosed herein includes the antisense strand and the sense strand of a sequence pair set forth in siTIMP1_p13 (SEQ ID NOS:855 and 936). In some preferred embodiments the nucleic acid molecule (e.g., a siNA molecule) as disclosed herein includes the antisense strand and the sense strand of a sequence pair set forth in siTIMP1_p15 (SEQ ID NOS:856 and 937). In some preferred embodiments the nucleic acid molecule (e.g., a siNA molecule) as disclosed herein includes the antisense strand and the sense strand of a sequence pair set forth in siTIMP1_p18 (SEQ ID NOS:857 and 938). In some preferred embodiments the nucleic acid molecule (e.g., a siNA molecule) as disclosed herein includes the antisense strand and the sense strand of a sequence pair set forth in siTIMP1_p44 (SEQ ID NOS:871 and 952). In some preferred embodiments the nucleic acid molecule (e.g., a siNA molecule) as disclosed herein includes the antisense strand and the sense strand of a sequence pair set forth in siTIMP1_p48 (SEQ ID NOS:874 and 955). In some preferred embodiments the nucleic acid molecule (e.g., a siNA molecule) as disclosed herein includes the antisense strand and the sense strand of a sequence pair set forth in siTIMP1_p51 (SEQ ID NOS:876 and 957). In some preferred embodiments the nucleic acid molecule (e.g., a siNA molecule) as disclosed herein includes the antisense strand and the sense strand of a sequence pair set forth in siTIMP1_p52 (SEQ ID NOS:877 and 958).

[0053] In some embodiments (N)x has complementarity to a consecutive sequence in SEQ ID NO:2 (human TIMP2 mRNA). In some embodiments (N)x includes an antisense oligonucleotide present in any one of Tables B5, B6, B7, and B8. In some embodiments x=y=18 and N1-(N)x includes an antisense oligonucleotide present in any one of Tables B3 or B4. In some embodiments x=y=19 or x=y=20. In certain preferred embodiments x=y=18.

[0054] In certain preferred embodiments, the antisense strand of a nucleic acid molecule (e.g., a siNA molecule) as disclosed herein includes a sequence corresponding to any one of the antisense sequences shown on Table B5. In certain preferred embodiments the antisense strand and the strand are selected from the sequence pairs shown in Table B6. In certain preferred embodiments the antisense strand and the strand are active in more than one species (human and at least one other species) and are selected from the sequence pairs shown in Table B6. In certain preferred embodiments the antisense strand and the strand are selected from the sequence pairs shown in Table B7, and preferably from Table B8.

[0055] In some embodiments the antisense and sense strands are selected from the sequence pairs set forth in siTIMP2_p1; siTIMP2_p2; siTIMP2_p3; siTIMP2_p5; siTIMP2_p6; siTIMP2_p7; siTIMP2_p8; siTIMP2_p9; siTIMP2_p10; siTIMP2_p11; siTIMP2_p12; siTIMP2_p13; siTIMP2_p14; siTIMP2_p15; siTIMP2_p19; siTIMP2_p21; siTIMP2_p22; siTIMP2_p23; siTIMP2_p26; siTIMP2_p28; siTIMP2_p31; siTIMP2_p32; siTIMP2_p34; siTIMP2_p36; siTIMP2_p42; siTIMP2_p43; siTIMP2_p45; siTIMP2_p47; siTIMP2_p48; siTIMP2_p49; siTIMP2_p50; siTIMP2_p52; siTIMP2_p53; siTIMP2_p54; siTIMP2_p56; siTIMP2_p57; siTIMP2_p58; siTIMP2_p59; siTIMP2_p60; siTIMP2_p63; siTIMP2_p66; siTIMP2_p70; siTIMP2_p72; siTIMP2_p73; siTIMP2_p74; siTIMP2_p77; siTIMP2_p80 and siTIMP2_p81, shown in Table B7, infra.

[0056] In some embodiments the antisense and sense strands are selected from the sequence pairs set forth in siTIMP2_p6 (SEQ ID NOS:4771 and 4819); siTIMP2_p9 (SEQ ID NOS:4774 and 4822); siTIMP2_p15 (SEQ ID NOS:4780 and 4828); siTIMP2_p19 (SEQ ID NOS:4781 and 4829); siTIMP2_p21 (SEQ ID NOS:4782 and 4830); siTIMP2_p22 (SEQ ID NOS:4783 and 4831); siTIMP2_p23 (SEQ ID NOS:4784 and 4832); siTIMP2_p28 (SEQ ID NOS:4786 and 4834); siTIMP2_p31 (SEQ ID NOS:4787 and 4835); siTIMP2_p36 (SEQ ID NOS:4790 and 4838); siTIMP2_p42 (SEQ ID NOS:4791 and 4839); siTIMP2_p47 (SEQ ID NOS:4794 and 4842); siTIMP2_p50 (SEQ ID NOS:4797 and 4845); siTIMP2_p56 (SEQ ID NOS:4801 and 4849); siTIMP2_p57 (SEQ ID NOS:4802 and 4850); siTIMP2_p58 (SEQ ID NOS:4803 and 4851); siTIMP2_p60 (SEQ ID NOS:4805 and 4853); siTIMP2_p63 (SEQ ID NOS:4806 and 4854); siTIMP2_p70 (SEQ ID NOS:4808 and 4856); siTIMP2_p73 (SEQ ID NOS:4810 and 4858); siTIMP2_p74 (SEQ ID NOS:4811 and 4859); and siTIMP2_p81 (SEQ ID NOS:4814 and 4862), shown in Table B8, infra.

[0057] In some embodiments the antisense and sense strands of a nucleic acid molecule (e.g., a siNA molecule) as disclosed herein includes the sequence pairs set forth in siTIMP2_p6 (SEQ ID NOS:4771 and 4819). In some embodiments the antisense and sense strands of a nucleic acid molecule (e.g., a siNA molecule) as disclosed herein includes the sequence pairs set forth in siTIMP2_p9 (SEQ ID NOS:4774 and 4822). In some embodiments the antisense and sense strands of a nucleic acid molecule (e.g., a siNA molecule) as disclosed herein includes the sequence pairs set forth in siTIMP2_p15 (SEQ ID NOS:4780 and 4828). In some embodiments the antisense and sense strands of a nucleic acid molecule (e.g., a siNA molecule) as disclosed herein includes the sequence pairs set forth in siTIMP2_p19 (SEQ ID NOS:4781 and 4829). In some embodiments the antisense and sense strands of a nucleic acid molecule (e.g., a siNA molecule) as disclosed herein includes the sequence pairs set forth in siTIMP2_p21 (SEQ ID NOS:4782 and 4830). In some embodiments the antisense and sense strands of a nucleic acid molecule (e.g., a siNA molecule) as disclosed herein includes the sequence pairs set forth in siTIMP2_p22 (SEQ ID NOS:4783 and 4831). In some embodiments the antisense and sense strands of a nucleic acid molecule (e.g., a siNA molecule) as disclosed herein includes the sequence pairs set forth in siTIMP2_p23 (SEQ ID NOS:4784 and 4832). In some embodiments the antisense and sense strands of a nucleic acid molecule (e.g., a siNA molecule) as disclosed herein includes the sequence pairs set forth in siTIMP2_p28 (SEQ ID NOS:4786 and 4834). In some embodiments the antisense and sense strands of a nucleic acid molecule (e.g., a siNA molecule) as disclosed herein includes the sequence pairs set forth in siTIMP2_p31 (SEQ ID NOS:4787 and 4835). In some embodiments the antisense and sense strands of a nucleic acid molecule (e.g., a siNA molecule) as disclosed herein includes the sequence pairs set forth in siTIMP2_p36 (SEQ ID NOS:4790 and 4838). In some embodiments the antisense and sense strands of a nucleic acid molecule (e.g., a siNA molecule) as disclosed herein includes the sequence pairs set forth in siTIMP2_p42 (SEQ ID NOS:4791 and 4839). In some embodiments the antisense and sense strands of a nucleic acid molecule (e.g., a siNA molecule) as disclosed herein includes the sequence pairs set forth in siTIMP2_p47 (SEQ ID NOS:4794 and 4842). In some embodiments the antisense and sense strands of a nucleic acid molecule (e.g., a siNA molecule) as disclosed herein includes the sequence pairs set forth in siTIMP2_p50 (SEQ ID NOS:4797 and 4845). In some embodiments the antisense and sense strands of a nucleic acid molecule (e.g., a siNA molecule) as disclosed herein includes the sequence pairs set forth in siTIMP2_p56 (SEQ ID NOS:4801 and 4849). In some embodiments the antisense and sense strands of a nucleic acid molecule (e.g., a siNA molecule) as disclosed herein includes the sequence pairs set forth in siTIMP2_p57 (SEQ ID NOS:4802 and 4850). In some embodiments the antisense and sense strands of a nucleic acid molecule (e.g., a siNA molecule) as disclosed herein includes the sequence pairs set forth in siTIMP2_p58 (SEQ ID NOS:4803 and 4851). In some embodiments the antisense and sense strands of a nucleic acid molecule (e.g., a siNA molecule) as disclosed herein includes the sequence pairs set forth in siTIMP2_p60 (SEQ ID NOS:4805 and 4853). In some embodiments the antisense and sense strands of a nucleic acid molecule (e.g., a siNA molecule) as disclosed herein includes the sequence pairs set forth in siTIMP2_p63 (SEQ ID NOS:4806 and 4854); siTIMP2_p70 (SEQ ID NOS:4808 and 4856). In some embodiments the antisense and sense strands of a nucleic acid molecule (e.g., a siNA molecule) as disclosed herein includes the sequence pairs set forth in siTIMP2_p73 (SEQ ID NOS:4810 and 4858). In some embodiments the antisense and sense strands of a nucleic acid molecule (e.g., a siNA molecule) as disclosed herein includes the sequence pairs set forth in siTIMP2_p74 (SEQ ID NOS:4811 and 4859). In some embodiments the antisense and sense strands of a nucleic acid molecule (e.g., a siNA molecule) as disclosed herein includes the sequence pairs set forth in siTIMP2_p81 (SEQ ID NOS:4814 and 4862).

[0058] In some embodiments N1 and N2 form a Watson-Crick base pair. In other embodiments N1 and N2 form a non-Watson-Crick base pair. In some embodiments N1 is a modified riboadenosine or a modified ribouridine.

[0059] In certain embodiments N1 is selected from the group consisting of riboadenosine, modified riboadenosine, deoxyriboadenosine, modified deoxyriboadenosine. In other embodiments N1 is selected from the group consisting of ribouridine, deoxyribouridine, modified ribouridine, and modified deoxyribouridine.

[0060] In certain embodiments N1 is selected from the group consisting of riboadenosine, modified riboadenosine, deoxyriboadenosine, modified deoxyriboadenosine and N2 is selected from the group consisting of ribouridine, deoxyribouridine, modified ribouridine, and modified deoxyribouridine. In certain embodiments N1 is selected from the group consisting of riboadenosine and modified riboadenosine and N2 is selected from the group consisting of ribouridine and modified ribouridine.

[0061] In certain embodiments N2 is selected from the group consisting of riboadenosine, modified riboadenosine, deoxyriboadenosine, modified deoxyriboadenosine and N1 is selected from the group consisting of ribouridine, deoxyribouridine, modified ribouridine, and modified deoxyribouridine. In certain embodiments N1 is selected from the group consisting of ribouridine and modified ribouridine and N2 is selected from the group consisting of riboadenine and modified riboadenine. In certain embodiments N1 is ribouridine and N2 is riboadenine.

[0062] In some embodiments of Structure (A2), N1 includes 2′OMe sugar-modified ribouracil or 2′OMe sugar-modified riboadenosine. In certain embodiments of structure (A), N2 includes a 2′OMe sugar modified ribonucleotide or deoxyribonucleotide.

[0063] In some embodiments Z and Z′ are absent. In other embodiments one of Z or Z′ is present.

[0064] In some embodiments each of N and N′ is an unmodified nucleotide. In some embodiments at least one of N or N′ includes a chemically modified nucleotide or an unconventional moiety. In some embodiments the unconventional moiety is selected from a mirror nucleotide, an abasic ribose moiety and an abasic deoxyribose moiety. In some embodiments the unconventional moiety is a mirror nucleotide, preferably an L-DNA moiety. In some embodiments at least one of N or N′ includes a 2′ OMe sugar-modified ribonucleotide.

[0065] In some embodiments the sequence of (N′)y is fully complementary to the sequence of (N)x. In other embodiments the sequence of (N′)y is substantially complementary to the sequence of (N)x.

[0066] In some embodiments (N)x includes an antisense sequence that is fully complementary to about 17 to about 39 consecutive nucleotides in a target mRNA. In other embodiments (N)x includes an antisense that is substantially complementary to about 17 to about 39 consecutive nucleotides in a target mRNA. In some embodiments (N)x includes an antisense that is substantially complementary to about 17, 18, 19, 20, 21, 22, 23, 24, 25, 26, 27, 28, 29, 30, 31, 32, 33, 34, 35, 36, 37, 38, to about 39 consecutive nucleotides in a target mRNA. In other embodiments (N)x includes an antisense that is substantially complementary to about 17 to about 23, 18 to about 23, 18 to about 21, or 18 to about 19 consecutive nucleotides in a target mRNA.

[0067] In some embodiments of Structure A1 and Structure A2 the compound is blunt ended, for example wherein both Z and Z′ are absent. In an alternative embodiment, at least one of Z or Z′ is present. Z and Z′ independently include one or more covalently linked modified and or unmodified nucleotides, including deoxyribonucleotides and ribonucleotides, or an unconventional moiety for example inverted abasic deoxyribose moiety or abasic ribose moiety; a non-nucleotide C3, C4 or C5 moiety, an amino-6 moiety, a mirror nucleotide and the like. In some embodiments each of Z and Z′ independently includes a C3 moiety or an amino-C6 moiety. In some embodiments Z′ is absent and Z is present and includes a non-nucleotide C3 moiety. In some embodiments Z is absent and Z′ is present and includes a non-nucleotide C3 moiety.

[0068] In some preferred embodiments of Structures A1 and Structure A2 an asymmetrical siNA compound molecule has a 3′ terminal non-nucleotide overhang (for example C3-C3 3′-overhang) on one side of a duplex occurring on the antisense strand; and a blunt end on the other side of the molecule. In some preferred embodiments z′ is present and the dsNA molecule has a 5′ terminal non-nucleotide overhang (for example an abasic moiety) on one side of a duplex occurring on the sense strand; and a blunt end on the other side of the molecule.

[0069] In some embodiments of Structure A1 and Structure A2 each N consists of an unmodified ribonucleotide. In some embodiments of Structure A1 and Structure A2 each N′ consists of an unmodified nucleotide. In preferred embodiments, at least one of N and N′ is a modified ribonucleotide or an unconventional moiety.

[0070] In other embodiments the compound of Structure A1 or Structure A2 includes at least one ribonucleotide modified in the sugar residue. In some embodiments the compound includes a modification at the 2′ position of the sugar residue. In some embodiments the modification in the 2′ position includes the presence of an amino, a fluoro, an alkoxy or an alkyl moiety. In certain embodiments the 2′ modification includes an alkoxy moiety. In preferred embodiments the alkoxy moiety is a methoxy moiety (also known as 2′-O-methyl; 2′OMe; 2′-OCH3). In some embodiments the nucleic acid compound includes 2′OMe sugar modified alternating ribonucleotides in one or both of the antisense and the sense strands. In other embodiments the compound includes 2′OMe sugar modified ribonucleotides in the antisense strand, (N)x or N1-(N)x, only. In certain embodiments the middle ribonucleotide of the antisense strand; e.g. ribonucleotide in position 10 in a 19-mer strand is unmodified. In various embodiments the nucleic acid compound includes at least 5 alternating 2′OMe sugar modified and unmodified ribonucleotides.

[0071] In additional embodiments the compound of Structure A1 or Structure A2 includes modified ribonucleotides in alternating positions wherein each ribonucleotide at the 5′ and 3′ termini of (N)x or N1-(N)x are modified in their sugar residues, and each ribonucleotide at the 5′ and 3′ termini of (N′)y or N2-(N)y are unmodified in their sugar residues.

[0072] In some embodiments, (N)x or N1-(N)x includes 2′OMe modified ribonucleotides at positions 2, 4, 6, 8, 11, 13, 15, 17 and 19. In other embodiments (N)x (N)x or N1-(N)x includes 2′OMe modified ribonucleotides at positions 1, 3, 5, 7, 9, 11, 13, 15, 17 and 19. In some embodiments (N)x or N1-(N)x includes 2′OMe modified pyrimidines. In some embodiments all the pyrimidine nucleotides in (N)x or N1-(N)x are 2′OMe modified. In some embodiments (N′)y or N2-(N′)y includes 2′OMe modified pyrimidines.

[0073] In additional embodiments the compound of Structure A1 or Structure A2 includes modified ribonucleotides in alternating positions wherein each ribonucleotide at the 5′ and 3′ termini of (N)x or N1-(N)x are modified in their sugar residues, and each ribonucleotide at the 5′ and 3′ termini of (N′)y or N2-(N)y are unmodified in their sugar residues.

[0074] In some embodiments of Structure A1 and Structure A2, neither of the sense strand nor the antisense strand is phosphorylated at the 3′ and 5′ termini. In other embodiments one or both of the sense strand or the antisense strand are phosphorylated at the 3′ termini.

[0075] In some embodiments of Structure A1 and Structure A2 (N)y includes at least one unconventional moiety selected from a mirror nucleotide and a nucleotide joined to an adjacent nucleotide by a 2′-5′ internucleotide phosphate bond also known as 2′-5′ linked or 2′-5′ linkage. In some embodiments the unconventional moiety is a mirror nucleotide. In various embodiments the mirror nucleotide is selected from an L-ribonucleotide (L-RNA) and an L-deoxyribonucleotide (L-DNA). In preferred embodiments the mirror nucleotide is L-DNA.

[0076] In some embodiments of Structure A1 (N′)y includes at least one L-DNA moiety. In some embodiments x=y=19 and (N′)y, consists of unmodified ribonucleotides at positions 1-17 and 19 and one L-DNA at the 3′ penultimate position (position 18). In other embodiments x=y=19 and (N′)y consists of unmodified ribonucleotides at position 1-16 and 19 and two consecutive L-DNA at the 3′ penultimate position (positions 17 and 18). In various embodiments the unconventional moiety is a nucleotide joined to an adjacent nucleotide by a 2′-5′ internucleotide phosphate linkage. According to various embodiments (N′)y includes 2, 3, 4, 5, or 6 consecutive ribonucleotides at the 3′ terminus linked by 2′-5′ internucleotide linkages. In one embodiment, four consecutive nucleotides at the 3′ terminus of (N′)y are joined by three 2′-5′ phosphodiester bonds, wherein one or more of the 2′-5′ nucleotides which form the 2′-5′ phosphodiester bonds further includes a 3′-O-methyl (3′OMe) sugar modification. Preferably the 3′ terminal nucleotide of (N′)y includes a 2′OMe sugar modification. In certain embodiments x=y=19 and (N′)y includes two or more consecutive nucleotides at positions 15, 16, 17, 18 and 19 include a nucleotide joined to an adjacent nucleotide by a 2′-5′ internucleotide bond. In various embodiments the nucleotide forming the 2′-5′ internucleotide bond includes a 3′ deoxyribose nucleotide or a 3′ methoxy nucleotide. In some embodiments x=y=19 and (N′)y includes nucleotides joined to the adjacent nucleotide by a 2′-5′ internucleotide bond between positions 15-16, 16-17 and 17-18 or between positions 16-17, 17-18 and 18-19. In some embodiments x=y=19 and (N′)y includes nucleotides joined to the adjacent nucleotide by a 2′-5′ internucleotide bond between positions 16-17 and 17-18 or between positions 17-18 and 18-19 or between positions 15-16 and 17-18. In other embodiments the pyrimidine ribonucleotides (rU, rC) in (N′)y are substituted with nucleotides joined to the adjacent nucleotide by a 2′-5′ internucleotide bond.

[0077] In some embodiments of Structure A2, (N)y includes at least one L-DNA moiety. In some embodiments x=y=18 and (N′)y consists of unmodified ribonucleotides at positions 1-16 and 18 and one L-DNA at the 3′ penultimate position (position 17). In other embodiments x=y=18 and (N′)y consists of unmodified ribonucleotides at position 1-15 and 18 and two consecutive L-DNA at the 3′ penultimate position (positions 16 and 17). In various embodiments the unconventional moiety is a nucleotide joined to an adjacent nucleotide by a 2′-5′ internucleotide phosphate linkage. According to various embodiments (N′)y includes 2, 3, 4, 5, or 6 consecutive ribonucleotides at the 3′ terminus linked by 2′-5′ internucleotide linkages. In one embodiment, four consecutive nucleotides at the 3′ terminus of (N′)y are joined by three 2′-5′ phosphodiester bonds, wherein one or more of the 2′-5′ nucleotides which form the 2′-5′ phosphodiester bonds further includes a 3′-O-methyl (3′OMe) sugar modification. Preferably the 3′ terminal nucleotide of (N′)y includes a 2′OMe sugar modification. In certain embodiments x=y=18 and in (N′)y two or more consecutive nucleotides at positions 14, 15, 16, 17, and 18 include a nucleotide joined to an adjacent nucleotide by a 2′-5′ internucleotide bond. In various embodiments the nucleotide forming the 2′-5′ internucleotide bond includes a 3′ deoxyribose nucleotide or a 3′ methoxy nucleotide. In some embodiments x=y=18 and (N′)y includes nucleotides joined to the adjacent nucleotide by a 2′-5′ internucleotide bond between positions 15-16, 16-17 and 17-18 or between positions 16-17 and 17-18. In some embodiments x=y=18 and (N′)y includes nucleotides joined to the adjacent nucleotide by a 2′-5′ internucleotide bond between positions 14-15, 15-16, 16-17, and 17-18 or between positions 15-16, 16-17, and 17-18 or between positions 16-17 and 17-18 or between positions 17-18 or between positions 15-16 and 17-18. In other embodiments the pyrimidine ribonucleotides (rU, rC) in (N′)y are substituted with nucleotides joined to the adjacent nucleotide by a 2′-5′ internucleotide bond.

[0078] In some embodiments, x=y=19 and (N′)y comprises five consecutive nucleotides at the 3′ terminus joined by four 2′-5′ linkages, specifically the linkages between the nucleotides position 15-16, 16-17, 17-18 and 18-19.

[0079] In some embodiments the internucleotide linkages include phosphodiester bonds. In some embodiments x=y=19 and (N′)y comprises five consecutive nucleotides at the 3′ terminus joined by four 2′-5′ linkages and optionally further includes Z′ and z′ independently selected from an inverted abasic moiety and a C3 alkyl [C3; 1,3-propanediol mono(dihydrogen phosphate)] cap.

[0080] In some embodiments x=y=19 and (N′)y comprises an L-DNA position 18; and (N′)y optionally further includes Z′ and z′ independently selected from an inverted abasic moiety and a C3 alkyl [C3; 1,3-propanediol mono(dihydrogen phosphate)] cap.

[0081] In some embodiments (N′)y comprises a 3′ terminal phosphate. In some embodiments (N′)y comprises a 3′ terminal hydroxyl.

[0082] In some embodiments x=y=19 and (N)x includes 2′OMe sugar modified ribonucleotides at positions 1, 3, 5, 7, 9, 11, 13, 15, 17, 19 or at positions 2, 4, 6, 8, 11, 13, 15, 17, 19. In some embodiments x=y=19 and (N)x includes 2′OMe sugar modified pyrimidines. In some embodiments all pyrimidines in (N)x include the 2′OMe sugar modification.

[0083] In some embodiments x=y=18 and N2 is a riboadenine moiety.

[0084] In some embodiments in x=y=18, and N2-(N′)y comprises five consecutive nucleotides at the 3′ terminus joined by four 2′-5′ linkages, specifically the linkages between the nucleotides position 15-16, 16-17, 17-18 and 18-19. In some embodiments the linkages include phosphodiester bonds.

[0085] In some embodiments x=y=18 and N2-(N′)y comprises five consecutive nucleotides at the 3′ terminus joined by four 2′-5′ linkages and optionally further includes Z′ and z′ independently selected from an inverted abasic moiety and a C3 alkyl [C3; 1,3-propanediol mono(dihydrogen phosphate)] cap.

[0086] In some embodiments x=y=18 and N2-(N′)y comprises an L-DNA position 18; and (N′)y optionally further includes Z′ and z′ independently selected from an inverted abasic moiety and a C3 alkyl [C3; 1,3-propanediol mono(dihydrogen phosphate)] cap.

[0087] In some embodiments N2-(N′)y comprises a 3′ terminal phosphate. In some embodiments N2-(N′)y comprises a 3′ terminal hydroxyl.

[0088] In some embodiments x=y=18 and N1-(N)x includes 2′OMe sugar modified ribonucleotides at positions 1, 3, 5, 7, 9, 11, 13, 15, 17, 19 or at positions 2, 4, 6, 8, 11, 13, 15, 17, 19.

[0089] In some embodiments x=y=18 and N1-(N)x includes 2′OMe sugar modified pyrimidines. In some embodiments all pyrimidines in (N)x include the 2′OMe sugar modification. In some embodiments N1-(N)x further comprises an L-DNA at position 6 or 7 (5′>3′). In other embodiments N1-(N)x further comprises a ribonucleotide which generates a 2′5′ internucleotide linkage in between the ribonucleotides at positions 5-6 or 6-7 (5′>3′)

[0090] In additional embodiments N1-(N)x further includes Z wherein Z comprises a non-nucleotide overhang. In some embodiments the non-nucleotide overhang is C3-C3 [1,3-propanediol mono(dihydrogen phosphate)]2.

[0091] In some embodiments the double stranded molecules disclosed herein, in particular molecules set forth in Tables A3, A4, A7, A8 and B3, B4, B7 and B8, include one or more of the following modifications:
[0092] a) N in at least one of positions 5, 6, 7, 8, or 9 from the 5′ terminus of the antisense strand is selected from a DNA, TNA, a 2′5′ nucleotide or a mirror nucleotide;
[0093] b) N′ in at least one of positions 9 or 10 from the 5′ terminus of the sense strand is selected from a TNA, 2′5′ nucleotide and a pseudoUridine;
[0094] c) N′ in 4, 5, or 6 consecutive positions at the 3′ terminus positions of (N′)y comprises a 2′5′ nucleotide;
[0095] d) one or more pyrimidine ribonucleotides are 2′ modified in the sense strand, the antisense strand or both the sense strand and the antisense strand.

[0096] In some embodiments the double stranded molecules in particular molecules set forth in Tables A3, A4, A7, A8 and B3, B4, B7 and B8 include a combination of the following modifications
[0097] a) the antisense strand includes a DNA, TNA, a 2′5′ nucleotide or a mirror nucleotide in at least one of positions 5, 6, 7, 8, or 9 from the 5′ terminus;
[0098] b) the sense strand includes at least one of a TNA, a 2′5′ nucleotide and a pseudoUridine in positions 9 or 10 from the 5′ terminus; and
[0099] c) one or more pyrimidine ribonucleotides are 2′ modified in the sense strand, the antisense strand or both the sense strand and the antisense strand.

[0100] In some embodiments the double stranded molecules in particular molecules set forth in Tables A3, A4, A7, A8 and B3, B4, B7 and B8 include a combination of the following modifications
[0101] a) the antisense strand includes a DNA, 2′5′ nucleotide or a mirror nucleotide in at least one of positions 5, 6, 7, 8, or 9 from the 5′ terminus;
[0102] b) the sense strand includes 4, 5, or 6 consecutive 2′5′ nucleotides at the 3′ penultimate or 3′ terminal positions; and
[0103] c) one or more pyrimidine ribonucleotides are 2′ modified in the sense strand, the antisense strand or both the sense strand and the antisense strand.

[0104] In some embodiments of Structure A1 and/or Structure A2 (N)y includes at least one unconventional moiety selected from a mirror nucleotide, a 2′5′ nucleotide and a TNA. In some embodiments the unconventional moiety is a mirror nucleotide. In various embodiments the mirror nucleotide is selected from an L-ribonucleotide (L-RNA) and an L-deoxyribonucleotide (L-DNA). In preferred embodiments the mirror nucleotide is L-DNA. In certain embodiments the sense strand comprises an unconventional moiety in position 9 or 10 (from the 5′ terminus). In preferred embodiments the sense strand includes an unconventional moiety in position 9 (from the 5′ terminus). In some embodiments the sense strand is 19 nucleotides in length and comprises 4, 5, or 6 consecutive unconventional moieties in positions 15, (from the 5′ terminus). In some embodiments the sense strand includes 4 consecutive 2′5′ ribonucleotides in positions 15, 16, 17, and 18. In some embodiments the sense strand includes 5 consecutive 2′5′ ribonucleotides in positions 15, 16, 17, 18 and 19. In various embodiments the sense strand further comprises Z′. In some embodiments Z′ includes a C3OH moiety or a C3Pi moiety.

[0105] In some embodiments of Structure A1 and/or Structure A2 (N)y comprises at least one unconventional moiety selected from a mirror nucleotide and a nucleotide joined to an adjacent nucleotide by a 2′-5′ internucleotide phosphate bond. In some embodiments the unconventional moiety is a mirror nucleotide. In various embodiments the mirror nucleotide is selected from an L-ribonucleotide (L-RNA) and an L-deoxyribonucleotide (L-DNA). In preferred embodiments the mirror nucleotide is L-DNA.

[0106] In some embodiments of Structure A1 (N′)y comprises at least one L-DNA moiety. In some embodiments x=y=19 and (N′)y consists of unmodified ribonucleotides at positions 1-17 and 19 and one L-DNA at the 3′ penultimate position (position 18). In other embodiments x=y=19 and (N′)y consists of unmodified ribonucleotides at position 1-16 and 19 and two consecutive L-DNA at the 3′ penultimate position (positions 17 and 18). In various embodiments the unconventional moiety is a nucleotide joined to an adjacent nucleotide by a 2′-5′ internucleotide phosphate linkage. According to various embodiments (N′)y comprises 2, 3, 4, 5, or 6 consecutive ribonucleotides at the 3′ terminus linked by 2′-5′ internucleotide linkages. In one embodiment, four consecutive nucleotides at the 3′ terminus of (N′)y are joined by three 2′-5′ phosphodiester bonds. In one embodiment, five consecutive nucleotides at the 3′ terminus of (N′)y are joined by four 2′-5′ phosphodiester bonds. In some embodiments, wherein one or more of the 2′-5′ nucleotides form a 2′-5′ phosphodiester bonds the nucleotide further comprises a 3′-O-methyl (3′OMe) sugar modification. In some embodiments the 3′ terminal nucleotide of (N′)y comprises a 3′OMe sugar modification. In certain embodiments x=y=19 and (N′)y comprises two or more consecutive nucleotides at positions 15, 16, 17, 18 and 19 comprise a nucleotide joined to an adjacent nucleotide by a 2′-5′ internucleotide bond. In various embodiments the nucleotide forming the 2′-5′ internucleotide bond comprises a 3′ deoxyribose nucleotide or a 3′ methoxy nucleotide. In some embodiments x=y=19 and (N′)y comprises nucleotides joined to the adjacent nucleotide by a 2′-5′ internucleotide bond between positions 15-16, 16-17 and 17-18 or between positions 16-17, 17-18 and 18-19. In some embodiments x=y=19 and (N′)y comprises nucleotides joined to the adjacent nucleotide by a 2′-5′ internucleotide bond between positions 16-17 and 17-18 or between positions 17-18 and 18-19 or between positions 15-16 and 17-18. In other embodiments the pyrimidine ribonucleotides (rU, rC) in (N′)y are substituted with nucleotides joined to the adjacent nucleotide by a 2′-5′ internucleotide bond.

[0107] In some embodiments of Structure A2 (N)y comprises at least one L-DNA moiety. In some embodiments x=y=18 and N2-(N′)y, consists of unmodified ribonucleotides at positions 1-17 and 19 and one L-DNA at the 3′ penultimate position (position 18). In other embodiments x=y=18 and N2-(N′)y consists of unmodified ribonucleotides at position 1-16 and 19 and two consecutive L-DNA at the 3′ penultimate position (positions 17 and 18). In various embodiments the unconventional moiety is a nucleotide joined to an adjacent nucleotide by a 2′-5′ internucleotide phosphate linkage. According to various embodiments N2-(N′)y comprises 2, 3, 4, 5, or 6 consecutive ribonucleotides at the 3′ terminus linked by 2′-5′ internucleotide linkages. In one embodiment, four consecutive nucleotides at the 3′ terminus of N2-(N′)y are joined by three 2′-5′ phosphodiester bonds, wherein one or more of the 2′-5′ nucleotides which form the 2′-5′ phosphodiester bonds further comprises a 3′-O-methyl (3′OMe) sugar modification. In some embodiments the 3′ terminal nucleotide of N2-(N′)y comprises a 2′OMe sugar modification. In certain embodiments x=y=18 and N2-(N′)y comprises two or more consecutive nucleotides at positions 15, 16, 17, 18 and 19 comprise a nucleotide joined to an adjacent nucleotide by a 2′-5′ internucleotide bond. In various embodiments the nucleotide forming the 2′-5′ internucleotide bond comprises a 3′ deoxyribose nucleotide or a 3′ methoxy nucleotide. In some embodiments x=y=18 and N2-(N′)y comprises nucleotides joined to the adjacent nucleotide by a 2′-5′ internucleotide bond between positions 16-17 and 17-18 or between positions 17-18 and 18-19 or between positions 15-16 and 17-18. In other embodiments the pyrimidine ribonucleotides (rU, rC) in (N′)y comprise nucleotides joined to the adjacent nucleotide by a 2′-5′ internucleotide bond.

[0108] In further embodiments of Structures A1 and A2 (N′)y comprises 1-8 modified ribonucleotides wherein the modified ribonucleotide is a deoxyribose (DNA) nucleotide. In certain embodiments (N′)y comprises 1, 2, 3, 4, 5, 6, 7, or up to 8 DNA moieties. In further embodiments of Structures A1 and A2 (N′)y includes 1-8 modified ribonucleotides wherein the modified ribonucleotide is a DNA nucleotide. In certain embodiments (N′)y includes 1, 2, 3, 4, 5, 6, 7, or up to 8 DNA moieties.

[0109] In some embodiments either Z or Z′ is present and independently includes two non-nucleotide moieties.

[0110] In additional embodiments Z and Z′ are present and each independently includes two non-nucleotide moieties.

[0111] In some embodiments each of Z and Z′ includes an abasic moiety, for example a deoxyriboabasic moiety (referred to herein as “dAb”) or riboabasic moiety (referred to herein as “rAb”). In some embodiments each of Z and/or Z′ includes two covalently linked abasic moieties and is for example dAb-dAb or rAb-rAb or dAb-rAb or rAb-dAb, wherein each moiety is covalently attached to an adjacent moiety, preferably via a phospho-based bond. In some embodiments the phospho-based bond includes a phosphorothioate, a phosphonoacetate or a phosphodiester bond. In preferred embodiments the phospho-based bond includes a phosphodiester bond.

[0112] In some embodiments each of Z and/or Z′ independently includes an alkyl moiety, optionally propane [(CH2)3] moiety (C3) or a derivative thereof including propanol (C3-OH) and phospho derivative of propanediol (“C3-3′Pi”). In some embodiments each of Z and/or Z′ includes two alkyl moieties and in some examples is C3-C3-OH. The 3′ terminus of the antisense strand and/or the 3′ terminus of the sense strand is covalently attached to a C3 moiety via a phospho-based bond and the C3 moiety is covalently conjugated a C3-OH moiety via a phospho-based bond. In some embodiments the phospho-based bonds include a phosphorothioate, a phosphonoacetate or a phosphodiester bond. In preferred embodiments the phospho-based bond includes a phosphodiester bond.

[0113] In one specific embodiment of Structure A1 or Structure A2, Z includes C3-C3-OH (a propyl moiety covalently linked to a propanol moiety via a phosphodiester bond). In some embodiments Z includes a propanol moiety covalently attached to the 3′ terminus of the antisense strand via a phosphodiester bond. In some embodiments the C3-C3-OH overhang is covalently attached to the 3′ terminus of (N)x or (N′)y via covalent linkage, for example a phosphodiester linkage. In some embodiments the linkage between a first C3 and a second C3 is a phosphodiester linkage.

[0114] In various embodiments the alkyl moiety is a C3 alkyl (“C3”) to C6 alkyl (“C6”) (e.g. C3, C4, C5 or C6) moiety including a terminal hydroxyl, a terminal amino, terminal phosphate group.

[0115] In some embodiments the alkyl moiety is a C3 alkyl moiety. In some embodiments the C3 alkyl moiety includes propanol, propylphosphate, propylphosphorothioate or a combination thereof.

[0116] The C3 alkyl moiety may be covalently linked to the 3′ terminus of (N′)y and or the 3′ terminus of (N)x via a phosphodiester bond. In some embodiments the alkyl moiety includes propanol, propyl phosphate (trimethyl phosphate) or propyl phosphorothioate (trimethyl phosphorothioate).

[0117] In some embodiments each of Z and Z′ is independently selected from propanol, propyl phosphate (trimethyl phosphate), propyl phosphorothioate (trimethyl phosphorothioate), combinations thereof or multiples thereof.

[0118] In some embodiments each of Z and Z′ is independently selected from propyl phosphate (trimethyl phosphate), propyl phosphorothioate (trimethyl phosphorothioate), propyl phospho-propanol; propyl phospho-propyl phosphorothioate; propylphospho-propyl phosphate; (propyl phosphate)3, (propyl phosphate)-2-propanol, (propyl phosphate)2-propyl phosphorothioate. Any propane or propanol conjugated moiety can be included in Z or Z′.

[0119] In additional embodiments each of Z and/or Z′ includes a combination of an abasic moiety and an unmodified deoxyribonucleotide or ribonucleotide or a combination of a hydrocarbon moiety and an unmodified deoxyribonucleotide or ribonucleotide or a combination of an abasic moiety (deoxyribo or ribo) and a hydrocarbon moiety. In such embodiments, each of Z and/or Z′ includes C3-rAb or C3-dAb wherein each moiety is covalently bond to the adjacent moiety via a phospho-based bond, preferably a phosphodiester, phosphorothioate or phosphonoacetate bond.

[0120] In certain embodiments nucleic acid molecules as disclosed herein include a sense oligonucleotide sequence selected from any one of Tables A1-B8.

[0121] In some embodiments, provided is a tandem structure and a triple armed structure, also known as RNAstar. Such structures are disclosed in PCT patent publication WO 2007/091269. A tandem oligonucleotide comprises at least two siRNA compounds.

[0122] A triple-stranded oligonucleotide may be an oligoribonucleotide having the general structure:

| | | | | |
|---|---|---|---|---|
| 5′ | oligo1 (sense) | LINKER A | Oligo2 (sense) | 3′ |
| 3′ | oligo1 (antisense) | LINKER B | Oligo3 (sense) | 5′ |
| 3′ | oligo3 (antisense) | LINKER C | oligo2 (antisense) | 5′ |
| | or | | | |
| 5′ | oligo1 (sense) | LINKER A | Oligo2 (antisense) | 3′ |
| 3′ | oligo1 (antisense) | LINKER B | Oligo3 (sense) | 5′ |
| 3′ | oligo3 (antisense) | LINKER C | oligo2 (sense) | 5′ |
| | or | | | |
| 5′ | oligo1 (sense) | LINKER A | oligo3 (antisense) | 3′ |
| 3′ | oligo1 (antisense) | LINKER B | oligo2 (sense) | 5′ |
| 5′ | oligo3 (sense) | LINKER C | oligo2 (antisense) | 3′ |

[0123] wherein one or more of linker A, linker B or linker C is present; any combination of two or more oligonucleotides and one or more of linkers A-C is possible, so long as the polarity of the strands and the general structure of the molecule remains. Further, if two or more of linkers A-C are present, they may be identical or different.

[0124] In some embodiments a “gapped” RNAstar compound is preferred wherein the compound consists of four ribonucleotide strands forming three siRNA duplexes having the general structure as follows:

[chemical structure]

wherein each of oligo A, oligo B, oligo C, oligo D, oligo E and oligo F represents at least 19 consecutive ribonucleotides, wherein from 19 to 40 of such consecutive ribonucleotides, in each of oligo A, B, C, D, E and F comprise a strand of a siRNA duplex, wherein each ribonucleotide may be modified or unmodified;
wherein strand 1 comprises oligo A which is either a sense portion or an antisense portion of a first siRNA duplex of the compound, strand 2 comprises oligo B which is complementary to at least 19 nucleotides in oligo A, and oligo A and oligo B together form a first siRNA duplex that targets a first target mRNA;
wherein strand 1 further comprises oligo C which is either a sense portion or an antisense strand portion of a second siRNA duplex of the compound, strand 3 comprises oligo D which is complementary to at least 19 nucleotides in oligo C and oligo C and oligo D together form a second siRNA duplex that targets a second target mRNA;
wherein strand 4 comprises oligo E which is either a sense portion or an antisense strand portion of a third siRNA duplex of the compound, strand 2 further comprises oligo F which is complementary to at least 19 nucleotides in oligo E and oligo E and oligo F together form a third siRNA duplex that targets a third target mRNA; and
wherein linker A is a moiety that covalently links oligo A and oligo C; linker B is a moiety that covalently links oligo B and oligo F, and linker A and linker B can be the same or different.

[0125] In some embodiments the first, second and third siRNA duplex target the same gene, In other embodiments two of the first, second or third siRNA duplexes target the same mRNA and the third siRNA duplex targets a different mRNA. In some embodiments each of the first, second and third duplex targets a different mRNA.

[0126] In another aspect, provided are methods for reducing the expression of TIMP1 and TIMP2 in a cell by introducing into a cell a nucleic acid molecule as provided herein in an amount sufficient to reduce expression of TIMP1 and TIMP2. In one embodiment, the cell is hepatocellular stellate cell. In another embodiment, the cell is a stellate cell in renal or pulmonary tissue. In certain embodiments, the method is performed in vitro, in other embodiments, the method is performed in vivo.

[0127] In yet another aspect, provided are methods for treating an individual suffering from a disease associated with TIMP1 and/or TIMP2. The methods include administering to the individual a nucleic acid molecule such as provided herein in an amount sufficient to reduce expression of TIMP1 or TIMP2. In certain embodiments the disease associated with TIMP1 or TIMP2 is a disease selected from the group consisting of liver fibrosis, cirrhosis, pulmonary fibrosis including lung fibrosis (including ILF), any condition causing kidney fibrosis (e.g., CKD including ESRD), peritoneal fibrosis, chronic hepatic damage, fibrillogenesis, fibrotic diseases in other organs, abnormal scarring (keloids) associated with all possible types of skin injury accidental and jatrogenic (operations); scleroderma; cardiofibrosis, fibrosis in the brain; failure of glaucoma filtering operation; and intestinal adhesions. The compounds are useful in treating organ specific indications including those shown in Table I below:

TABLE I

| Organ | Indication |
|---|---|
| Skin | Pathologic scarring as keloid and hypertrophic scar |
| | Surgical scarring |
| | Injury scarring |
| | keloid, or nephrogenic fibrosing dermatopathy |
| Peritoneum | Peritoneal fibrosis |
| | Adhesions |
| | Peritoneal Sclerosis associated with continual ambulatory peritoneal dialysis |
| | (CAPD) |
| Liver | Cirrhosis including post-hepatitis C cirrhosis, primary biliary cirrhosis |
| | Liver fibrosis, e.g. Prevention of Liver Fibrosis in Hepatitis C carriers |
| | schistomasomiasis |
| | cholangitis |
| | Liver cirrhosis due to Hepatitis C post liver transplant or Non-Alcoholic |
| | Steatohepatitis (NASH) |
| Pancreas | inter(peri)lobular fibrosis (as in alcoholic chronic pancreatitis), periductal |
| | fibrosis (as in hereditary pancreatitis), periductal and interlobular fibrosis (as |
| | in autoimmune pancreatitis), diffuse inter- and intralobular fibrosis (as in |
| | obstructive chronic pancreatitis) |
| Kidney | Chronic Kidney Disease (CKD) of any etiology. Treatment of early stage |
| | CKD (elevated SCr) in diabetic patients (“prevent” further deterioration in |
| | renal function) |
| | kidney fibrosis associated with lupus glomeruloschelerosis |
| | Diabetic Nephropathy |
| Heart | Congestive heart failure, |
| | Endomyocardial fibrosis, |
| | cardiofibrosis |
| | fibrosis associated with myocardial infarction |
| Lung | Asthma, Idiopathic pulmonary fibrosis (IPF); Radiation fibrosis, a sequel of |
| | radiation pneumonitis (e.g. due to cancer treating radiation) |
| | Interstitial lung fibrosis (ILF) |
| | Radiation Pneumonitis leading to Pulmonary Fibrosis (e.g. due to cancer |
| | treating radiation) |
| Bone marrow | Myeloproliferative disorders: Myelofibrosis (MF), Polycythemia vera (PV), |
| | Essential thrombocythemia (ET) |
| | idiopathic myelofibrosis |
| | drug induced myelofibrosis. |
| Eye | Anterior segment: Corneal opacification e,g, following inherited dystrophies, |
| | herpetic keratitis or pterygia; Glaucoma |
| | Posterior segment fibrosis and traction retinal detachment, a complication of |
| | advanced diabetic retinopathy (DR); Fibrovascular scarring and gliosis in the |
| | retina; |
| | Under the retina fibrosis for example subsequent to subretinal hemorrhage |
| | associated with neovascular AMD |
| | Retro-orbital fibrosis, postcataract surgery, proliferative vitreoretinopathy. |
| | Ocular cicatricial pemphigoid |
| Intestine | Intestinal fibrosis, Crohn's disease |
| Vocal cord | Vocal cord scarring, vocal cord mucosal fibrosis, laryngeal fibrosis |
| Vasculature | Atherosclerosis, postangioplasty arterial restenosis |
| Brain | Fibrosis associated with brain (cerebral) infarction |
| Multisystemic | Scleroderma systemic sclerosis; multifocal fibrosclerosis; sclerodermatous |
| | graft-versus-host disease in bone marrow transplant recipients, and |
| | nephrogenic systemic fibrosis (exposure to gadolinium-based contrast agents |
| | (GBCAs), 30% of MRIs) |
| Malignancies | Metastatic and invasive cancer by inhibiting function of activated tumor |
| of various | associated myofibroblasts |
| origin | |

[0128] In some embodiments the preferred indications include, Liver cirrhosis due to Hepatitis C post liver transplant; Liver cirrhosis due to Non-Alcoholic Steatohepatitis (NASH); Idiopathic Pulmonary Fibrosis (IPF); Radiation Pneumonitis leading to Pulmonary Fibrosis; Diabetic Nephropathy; Peritoneal Sclerosis associated with continual ambulatory peritoneal dialysis (CAPD) and Ocular cicatricial pemphigoid.

[0129] Fibrotic Liver indications include Alcoholic Cirrhosis, Hepatitis B cirrhosis, Hepatitis C cirrhosis, Hepatitis C (Hep C) cirrhosis post orthotopic liver transplant (OLTX), NASH/NAFLD wherein NASH is an extreme form of nonalcoholic fatty liver disease (NAFLD), Primary biliary cirrhosis (PBC), Primary sclerosing cholangitis (PSC), Biliary atresia, alpha1 antitrypsin deficiency (A1AD), Copper storage diseases (Wilson's disease), Fructosemia, Galactosemia, Glycogen storage diseases (especially types III, IV, VI, IX, and X), Iron-overload syndromes (hemochromatosis), Lipid abnormalities (e.g., Gaucher's disease). Peroxisomal disorders (eg, Zellweger syndrome), Tyrosinemia, Congenital hepatic fibrosis, Bacterial Infections (eg, brucellosis), Parasitic (eg, echinococcosis), Budd-Chiari syndrome (hepatic veno-occlusive disease).

[0130] Pulmonary Indications indications include Idiopathic Pulmonary Fibrosis, Silicosis, Pneumoconiosis, Bronchopulmonary Dysplasia in newborn following neonatal respiratory distress syndrome, Bleomycin/chemotherapeutic induced lung injury, Brochiolitis Obliterans (BOS) post lung transplant, Chronic obstructive pulmonary disorder (COPD), Cystic Fibrosis, Asthma.

[0131] Cardiac indications include Cardiomyopathy, Atherosclerosis (Bergers disease, etc), Endomyocardial fibrosis, Atrial Fibrillation, Scarring post Myocardial Infarction (MI).

[0132] Other Thoracic indications include Radiation-induced capsule tissue reactions around textured breast implants and Oral submucosal fibrosis.

[0133] Renal indications include Autosomal Dominant Polycystic Kidney Disease (ADPKD), Diabetic nephropathy (diabetic glomerulosclerosis), FSGS (collapsing vs. other histologic variants), IgA Nephropathy (Berger Disease), Lupus Nephritis, Wegner's, Scleroderma, Goodpasture Syndrome, tubulointerstitial fibrosis: drug induced (protective) pencillins, cephalosporins, analgesic nephropathy, Membranoproliferative glomerulonephritis (MPGN), Henoch-Schonlein Purpura, Congenital nephropathies: Medullary Cystic Disease, Nail-Patella Syndrome and Alport Syndrome.

[0134] Bone Marrow indications include lympangiolyomyositosis (LAM), Chronic graft vs. host disease, Polycythemia vera, Essential thrombocythemia, Myelofibrosis.

[0135] Ocular indications include Retinopathy of Prematurity (RoP), Ocular cicatricial pemphigoid, Lacrimal gland fibrosis, Retinal attachment surgery, Corneal opacity, Herpetic keratitis, Pterygia, Glaucoma, Age-related macular degeneration (AMD/ARMD), Retinal fibrosis associated Diabetes mellitus (DM) retinopathy.

[0136] Brain indications include fibrosis associated with brain infarction.

[0137] Gynecological indications include Endometriosis add on to hormonal therapy for prevention of scarring, post STD fibrosis/salphingitis.

[0138] Systemic indications include Dupuytren's disease, palmar fibromatosis, Peyronie's disease, Ledderhose disease, keloids, multifocal fibrosclerosis, nephrogenic systemic fibrosis, nephrogenic myelofibrosis (anemia).

[0139] Injury Associated Fibrotic Diseases include Burn (chemical included) induced skin & soft tissue scarring and contraction, Radiation induce skin & organ scarring post cancer therapeutic radiation treatment, Keloid (skin).

[0140] Surgical indications include peritoneal fibrosis post peritoneal dialysis catheter, corneal implant, cochlear implant, other implants, silicone implants in breasts, chronic sinusitis; adhesions, pseudointimal hyperplasia of dialysis grafts.

[0141] Other indications include Chronic Pancreatitis.

[0142] In some embodiments the methods include administering to the individual a nucleic acid molecule such as provided herein in an amount sufficient to reduce expression of TIMP1. In some embodiments the methods include administering to the individual a nucleic acid molecule such as provided herein in an amount sufficient to reduce expression of TIMP2. In some embodiments the methods include administering to the individual nucleic acid molecules such as provided herein in an amount sufficient to reduce expression of TIMP1. In some embodiments the methods include administering to the individual nucleic acid molecules such as provided herein in an amount sufficient to reduce expression of TIMP2. In some embodiments provided is a nucleic acid disclosed herein for the treatment of a fibrotic disease selected from a disease or disorder set forth in Table I. In another embodiment provided is a nucleic acid molecule for use in therapy. In some embodiments therapy comprises treatment of a fibrotic disease or disorder set forth in Table I. In some embodiments provided is use of a nucleic acid molecule disclosed herein for the preparation of a medicament useful in treating a fibrotic disease or disorder set forth in Table I. In some embodiments the nucleic acid molecule is set forth in Table C, e.g. TIMP1-A, TIMP1-B, TIMP1-C. In some embodiments the nucleic acid molecule is set forth in Table D, e.g. TIMP2-A, TIMP2-B, TIMP2-C, TIMP2-D, TIMP2-E. In some embodiments the sense and antisense sequences of the nucleic acid molecule are selected from the sequence pairs set forth in any one of Table A3, Table A4, Table A7 or Table A8. In some embodiments the sense and antisense sequences of the nucleic acid molecule are selected from the sequence pairs set forth in any one of Table B3, Table B4, Table B7 or Table B8.

[0143] In one aspect, provided are pharmaceutical compositions that include a nucleic acid molecule (e.g., an siNA molecule) as described herein in a pharmaceutically acceptable carrier. In certain embodiments, the pharmaceutical formulation includes, or involves, a delivery system suitable for delivering nucleic acid molecules (e.g., siNA molecules) to an individual such as a patient; for example delivery systems described in more detail below.

[0144] In a related aspect, provided are compositions or kits that include a nucleic acid molecule (e.g., an siNA molecule) packaged for use by a patient. The package may be labeled or include a package label or insert that indicates the content of the package and provides certain information regarding how the nucleic acid molecule (e.g., an siNA molecule) should be or can be used by a patient, for example the label may include dosing information and/or indications for use. In certain embodiments the contents of the label will bear a notice in a form prescribed by a government agency, for example the United States Food and Drug Administration (FDA). In certain embodiments, the label may indicate that the nucleic acid molecule (e.g., an siNA molecule) is suitable for use in treating a patient suffering from a disease associated with TIMP1 or TIMP2; for example, the label may indicate that the nucleic acid molecule (e.g., an siNA molecule) is suitable for use in treating fibroids; or for example the label may indicate that the nucleic acid molecule (e.g., an siNA molecule) is suitable for use in treating a disease selected from the group consisting of fibrosis, liver fibrosis, cirrhosis, pulmonary fibrosis, kidney fibrosis, peritoneal fibrosis, chronic hepatic damage, and fibrillogenesis.

[0145] As used herein, the term “tissue inhibitor of metalloproteinases 1” or “TIMP1” are used interchangeably and refer to any tissue inhibitor of metalloproteinases 1 peptide, or polypeptide having any TIMP1 protein activity. Tissue inhibitor of metalloproteinases 1 is a natural inhibitor of matrix metalloproteinases. In certain preferred embodiments, “TIMP1” refers to human TIMP1. Tissue inhibitor of metalloproteinases 1 (or more particularly human TIMP1) may have an amino acid sequence that is the same, or substantially the same, as SEQ ID NO. 3 (FIG. 1C).

[0146] As used herein, the term “tissue inhibitor of metalloproteinases 2” or “TIMP2” are used interchangeably and refer to any tissue inhibitor of metalloproteinases 2 peptide, or polypeptide having any TIMP2 protein activity. Tissue inhibitor of metalloproteinases 2 (or more particularly human TIMP2) may have an amino acid sequence that is the same, or substantially the same, as SEQ ID NO. 4 (FIG. 1D).

[0147] As used herein the term “nucleotide sequence encoding TIMP1 and TIMP2” means a nucleotide sequence that codes for a TIMP1 and TIMP2 protein or portion thereof. The term “nucleotide sequence encoding TIMP1 and TIMP2” is also meant to include TIMP1 and TIMP2 coding sequences such as TIMP1 and TIMP2 isoforms, mutant TIMP1 and TIMP2 genes, splice variants of TIMP1 and TIMP2 genes, and TIMP1 and TIMP2 gene polymorphisms. A nucleic acid sequence encoding TIMP1 and TIMP2 includes mRNA sequences encoding TIMP1 and TIMP2, which can also be referred to as “TIMP1 and TIMP2 mRNA.” Exemplary sequences of human TIMP1 mRNA and TIMP2 mRNA are set forth as SEQ ID. NO. 1 and SEQ ID NO:2, respectively.

[0148] As used herein, the term “nucleic acid molecule” or “nucleic acid” are used interchangeably and refer to an oligonucleotide, nucleotide or polynucleotide. Variations of “nucleic acid molecule” are described in more detail herein. A nucleic acid molecule encompasses both modified nucleic acid molecules and unmodified nucleic acid molecules as described herein. A nucleic acid molecule may include deoxyribonucleotides, ribonucleotides, modified nucleotides or nucleotide analogs in any combination.

[0149] As used herein, the term “nucleotide” refers to a chemical moiety having a sugar (or an analog thereof, or a modified sugar), a nucleotide base (or an analog thereof, or a modified base), and a phosphate group (or analog thereof, or a modified phosphate group). A nucleotide encompasses both modified nucleotides or unmodified nucleotides as described herein. As used herein, nucleotides may include deoxyribonucleotides (e.g., unmodified deoxyribonucleotides), ribonucleotides (e.g., unmodified ribonucleotides), and modified nucleotide analogs including, inter alia, locked nucleic acids and unlocked nucleic acids, peptide nucleic acids, L-nucleotides (also referred to as mirror nucleotides), ethylene-bridged nucleic acid (ENA), arabinoside, PACE, nucleotides with a 6 carbon sugar, as well as nucleotide analogs (including abasic nucleotides) often considered to be non-nucleotides. In some embodiments, nucleotides may be modified in the sugar, nucleotide base and/or in the phosphate group with any modification known in the art, such as modifications described herein. A “polynucleotide” or “oligonucleotide” as used herein refer to a chain of linked nucleotides; polynucleotides and oligonucleotides may likewise have modifications in the nucleotide sugar, nucleotide bases and phosphate backbones as are well known in the art and/or are disclosed herein.

[0150] As used herein, the term “short interfering nucleic acid”, “siNA”, or “short interfering nucleic acid molecule” refers to any nucleic acid molecule capable of modulating gene expression or viral replication. Preferably siNA inhibits or down regulates gene expression or viral replication. siNA includes without limitation nucleic acid molecules that are capable of mediating sequence specific RNAi, for example short interfering RNA (siRNA), double-stranded RNA (dsRNA), micro-RNA (miRNA), short hairpin RNA (shRNA), short interfering oligonucleotide, short interfering nucleic acid, short interfering modified oligonucleotide, chemically-modified siRNA, post-transcriptional gene silencing RNA (ptgsRNA), and others. As used herein, “short interfering nucleic acid”, “siNA”, or “short interfering nucleic acid molecule” has the meaning described in more detail elsewhere herein.

[0151] As used herein, the term “complementary” means that a nucleic acid can form hydrogen bond(s) with another nucleic acid sequence by either traditional Watson-Crick or other non-traditional types. In reference to the nucleic molecules disclosed herein, the binding free energy for a nucleic acid molecule with its complementary sequence is sufficient to allow the relevant function of the nucleic acid to proceed, e.g., RNAi activity. Determination of binding free energies for nucleic acid molecules is well known in the art (see, e.g., Turner et al., 1987, CSH Symp. Quant. Biol. LII pp. 123-133; Frier et al., 1986, Proc. Nat. Acad. Sci. USA 83:9373-9377; Turner et al., 1987, J. Am. Chem. Soc. 109:3783-3785). A percent complementarity indicates the percentage of contiguous residues in a nucleic acid molecule that can form hydrogen bonds (e.g., Watson-Crick base pairing) with a second nucleic acid sequence (e.g., 5, 6, 7, 8, 9, or 10 nucleotides out of a total of 10 nucleotides in the first oligonucleotide being based paired to a second nucleic acid sequence having 10 nucleotides represents 50%, 60%, 70%, 80%, 90%, and 100% complementary respectively). “Fully complementary” means that all the contiguous residues of a nucleic acid sequence will hydrogen bond with the same number of contiguous residues in a second nucleic acid sequence. In one embodiment, a nucleic acid molecule disclosed herein includes about 15 to about 35 or more (e.g., about 15, 16, 17, 18, 19, 20, 21, 22, 23, 24, 25, 26, 27, 28, 29, 30, 31, 32, 33, 34 or 35 or more) nucleotides that are complementary to one or more target nucleic acid molecules or a portion thereof.

[0152] As used herein, the term “sense region” refers to a nucleotide sequence of a siNA molecule complementary (partially or fully) to an antisense region of the siNA molecule. The sense strand of a siNA molecule can include a nucleic acid sequence having homology with a target nucleic acid sequence. As used herein, “sense strand” refers to nucleic acid molecule that includes a sense region and may also include additional nucleotides.

[0153] As used herein, the term “antisense region” refers to a nucleotide sequence of a siNA molecule complementary (partially or fully) to a target nucleic acid sequence. The antisense strand of a siNA molecule can optionally include a nucleic acid sequence complementary to a sense region of the siNA molecule. As used herein, “antisense strand” refers to nucleic acid molecule that includes an antisense region and may also include additional nucleotides.

[0154] As used herein, the term “RNA” refers to a molecule that includes at least one ribonucleotide residue.

[0155] As used herein, the term “duplex region” refers to the region in two complementary or substantially complementary oligonucleotides that form base pairs with one another, either by Watson-Crick base pairing or any other manner that allows for a duplex between oligonucleotide strands that are complementary or substantially complementary. For example, an oligonucleotide strand having 21 nucleotide units can base pair with another oligonucleotide of 21 nucleotide units, yet only 19 bases on each strand are complementary or substantially complementary, such that the “duplex region” consists of 19 base pairs. The remaining base pairs may, for example, exist as 5′ and 3′ overhangs. Further, within the duplex region, 100% complementarity is not required; substantial complementarity is allowable within a duplex region. Substantial complementarity refers to complementarity between the strands such that they are capable of annealing under biological conditions. Techniques to empirically determine if two strands are capable of annealing under biological conditions are well know in the art. Alternatively, two strands can be synthesized and added together under biological conditions to determine if they anneal to one another.

[0156] As used herein, the terms “non-pairing nucleotide analog” means a nucleotide analog which includes a non-base pairing moiety including but not limited to: 6 des amino adenosine (Nebularine), 4-Me-indole, 3-nitropyrrole, 5-nitroindole, Ds, Pa, N3-Me ribo U, N3-Me riboT, N3-Me dC, N3-Me-dT, N1-Me-dG, N1-Me-dA, N3-ethyl-dC, N3-Me dC. In some embodiments the non-base pairing nucleotide analog is a ribonucleotide. In other embodiments it is a deoxyribonucleotide.

[0157] As used herein, the term, “terminal functional group” includes without limitation a halogen, alcohol, amine, carboxylic, ester, amide, aldehyde, ketone, ether groups.

[0158] An “abasic nucleotide” or “abasic nucleotide analog” is as used herein may also be often referred to herein and in the art as a pseudo-nucleotide or an unconventional moiety. While a nucleotide is a monomeric unit of nucleic acid, generally consisting of a ribose or deoxyribose sugar, a phosphate, and a base (adenine, guanine, thymine, or cytosine in DNA; adenine, guanine, uracil, or cytosine in RNA). an abasic or pseudo-nucleotide lacks a base, and thus is not strictly a nucleotide as the term is generally used in the art. Abasic deoxyribose moieties include for example, abasic deoxyribose-3′-phosphate; 1,2-dideoxy-D-ribofuranose-3-phosphate; 1,4-anhydro-2-deoxy-D-ribitol-3-phosphate. Inverted abasic deoxyribose moieties include inverted deoxyriboabasic; 3′,5′ inverted deoxyabasic 5′-phosphate.

[0159] The term “capping moiety” (z″) as used herein includes a moiety which can be covalently linked to the 5′ terminus of (N′)y and includes abasic ribose moiety, abasic deoxyribose moiety, modifications abasic ribose and abasic deoxyribose moieties including 2′ O alkyl modifications; inverted abasic ribose and abasic deoxyribose moieties and modifications thereof; C6-imino-Pi; a mirror nucleotide including L-DNA and L-RNA; 5′OMe nucleotide; and nucleotide analogs including 4′,5′-methylene nucleotide; 1-(β-D-erythrofuranosyl)nucleotide; 4′-thio nucleotide, carbocyclic nucleotide; 5′-amino-alkyl phosphate; 1,3-diamino-2-propyl phosphate, 3-aminopropyl phosphate; 6-aminohexyl phosphate; 12-aminododecyl phosphate; hydroxypropyl phosphate; 1,5-anhydrohexitol nucleotide; alpha-nucleotide; threo-pentofuranosyl nucleotide; acyclic 3′,4′-seco nucleotide; 3,4-dihydroxybutyl nucleotide; 3,5-dihydroxypentyl nucleotide, 5′-5′-inverted abasic moiety; 1,4-butanediol phosphate; 5′-amino; and bridging or non bridging methylphosphonate and 5′-mercapto moieties.

[0160] Certain capping moieties may be abasic ribose or abasic deoxyribose moieties; inverted abasic ribose or abasic deoxyribose moieties; C6-amino-Pi; a mirror nucleotide including L-DNA and L-RNA. The nucleic acid molecules as disclosed herein may be synthesized using one or more inverted nucleotides, for example inverted thymidine or inverted adenine (for example see Takei, et al., 2002. JBC 277(26):23800-06).

[0161] The term “unconventional moiety” as used herein refers to non-nucleotide moieties including an abasic moiety, an inverted abasic moiety, a hydrocarbon (alkyl) moiety and derivatives thereof, and further includes a deoxyribonucleotide, a modified deoxyribonucleotide, a mirror nucleotide (L-DNA or L-RNA), a non-base pairing nucleotide analog and a nucleotide joined to an adjacent nucleotide by a 2′-5′ internucleotide phosphate bond; bridged nucleic acids including LNA and ethylene bridged nucleic acids, linkage modified (e.g. PACE) and base modified nucleotides as well as additional moieties explicitly disclosed herein as unconventional moieties.

[0162] As used herein, the term “inhibit”, “down-regulate”, or “reduce” with respect to gene expression means the expression of the gene, or level of RNA molecules or equivalent RNA molecules encoding one or more proteins or protein subunits (e.g., mRNA), or activity of one or more proteins or protein subunits, is reduced below that observed in the absence of an inhibitory factor (such as a nucleic acid molecule, e.g., an siNA, for example having structural features as described herein); for example the expression may be reduced to 90%, 80%, 70%, 60%, 50%, 40%, 30%, 20%, 10%, 5% or less than that observed in the absence of an inhibitor.

### BRIEF DESCRIPTION OF THE FIGURES

[0163] FIGS. 1A-1D show exemplary polynucleotide and polypeptide sequences. FIG. 1A shows mRNA sequence of human TIMP1 (NM_{—}003254.2 GI:73858576; SEQ ID NO:1). FIG. 1B shows mRNA sequence of TIMP2 (NM_{—}003255.4 GI:738585774; SEQ ID NO:2). FIG. 1C shows polypeptide sequence of human TIMP1 (NP_{—}003245.1 GI:4507509; SEQ ID NO:3). FIG. 1D shows polypeptide sequence of human TIMP2 (NP_{—}003246.1 GI:4507511; SEQ ID NO:4).

[0164] FIG. 2 shows knock down efficacy as determined by qPCR of TIMP1-A, TIMP1-B or TIMP1-C siRNAs (Table C) for TIMP1. The siRNA compounds were capable of knocking down the target TIMP1 gene.

[0165] FIG. 3 shows knock down efficacy as determined by qPCR TIMP2-A, TIMP2-B, TIMP2-C, TIMP2-D and TIMP2-E siRNAs (Table D). The siRNA compounds were capable of knocking down the target TIMP2 gene.

[0166] FIG. 4 shows the results of an in vivo assay testing the efficacy of siTIMP1 and siTIMP2 in treating liver fibrosis. Analysis of the liver fibrosis area was performed using Sirius red staining. The fibrotic area was calculated as the mean of 4 liver sections. The bar graph summarizes the digital quantification of staining for each group.

### DETAILED DESCRIPTION OF THE INVENTION

[0167] RNA Interference and siNA Nucleic Acid Molecules

[0168] RNA interference refers to the process of sequence-specific post-transcriptional gene silencing in animals mediated by short interfering RNAs (siRNAs) (Zamore et al., 2000, Cell, 101, 25-33; Fire et al., 1998, Nature, 391, 806; Hamilton et al., 1999, Science, 286, 950-951; Lin et al., 1999, Nature, 402, 128-129; Sharp, 1999, Genes & Dev., 13:139-141; and Strauss, 1999, Science, 286, 886). The corresponding process in plants (Heifetz et al., International PCT Publication No. WO 99/61631) is often referred to as post-transcriptional gene silencing (PTGS) or RNA silencing. The process of post-transcriptional gene silencing is thought to be an evolutionarily-conserved cellular defense mechanism used to prevent the expression of foreign genes (Fire et al., 1999, Trends Genet., 15, 358). Such protection from foreign gene expression may have evolved in response to the production of double-stranded RNAs (dsRNAs) derived from viral infection or from the random integration of transposon elements into a host genome via a cellular response that specifically destroys homologous single-stranded RNA or viral genomic RNA. The presence of dsRNA in cells triggers the RNAi response through a mechanism that has yet to be fully characterized. This mechanism appears to be different from other known mechanisms involving double stranded RNA-specific ribonucleases, such as the interferon response that results from dsRNA-mediated activation of protein kinase PKR and 2′,5′-oligoadenylate synthetase resulting in non-specific cleavage of mRNA by ribonuclease L (see for example U.S. Pat. Nos. 6,107,094; 5,898,031; Clemens et al., 1997, J. Interferon & Cytokine Res., 17, 503-524; Adah et al., 2001, Curr. Med. Chem., 8, 1189).

[0169] The presence of long dsRNAs in cells stimulates the activity of a ribonuclease III enzyme referred to as dicer (Bass, 2000, Cell, 101, 235; Zamore et al., 2000, Cell, 101, 25-33; Hammond et al., 2000, Nature, 404, 293). Dicer is involved in the processing of the dsRNA into short pieces of dsRNA known as short interfering RNAs (siRNAs) (Zamore et al., 2000, Cell, 101, 25-33; Bass, 2000, Cell, 101, 235; Berstein et al., 2001, Nature, 409, 363). Short interfering RNAs derived from dicer activity are typically about 21 to about 23 nucleotides in length and include about 19 base pair duplexes (Zamore et al., 2000, Cell, 101, 25-33; Elbashir et al., 2001, Genes Dev., 15, 188). Dicer has also been implicated in the excision of 21- and 22-nucleotide small temporal RNAs (stRNAs) from precursor RNA of conserved structure that are implicated in translational control (Hutvagner et al., 2001, Science, 293, 834). The RNAi response also features an endonuclease complex, commonly referred to as an RNA-induced silencing complex (RISC), which mediates cleavage of single-stranded RNA having sequence complementary to the antisense strand of the siRNA duplex. Cleavage of the target RNA takes place in the middle of the region complementary to the antisense strand of the siRNA duplex (Elbashir et al., 2001, Genes Dev., 15, 188).

[0170] RNAi has been studied in a variety of systems. Fire et al., 1998, Nature, 391, 806, were the first to observe RNAi in C. elegans. Bahramian and Zarbl, 1999, Molecular and Cellular Biology, 19, 274-283 and Wianny and Goetz, 1999, Nature Cell Biol., 2, 70, describe RNAi mediated by dsRNA in mammalian systems. Hammond et al., 2000, Nature, 404, 293, describe RNAi in Drosophila cells transfected with dsRNA. Elbashir et al., 2001, Nature, 411, 494 and Tuschl et al., International PCT Publication No. WO 01/75164, describe RNAi induced by introduction of duplexes of synthetic 21-nucleotide RNAs in cultured mammalian cells including human embryonic kidney and HeLa cells. Recent work in Drosophila embryonic lysates (Elbashir et al., 2001, EMBO J., 20, 6877 and Tuschl et al., International PCT Publication No. WO 01/75164) has revealed certain requirements for siRNA length, structure, chemical composition, and sequence that are essential to mediate efficient RNAi activity.

[0171] Nucleic acid molecules (for example having structural features as disclosed herein) may inhibit or down regulate gene expression or viral replication by mediating RNA interference “RNAi” or gene silencing in a sequence-specific manner; see e.g., Zamore et al., 2000, Cell, 101, 25-33; Bass, 2001, Nature, 411, 428-429; Elbashir et al., 2001, Nature, 411, 494-498; and Kreutzer et al., International PCT Publication No. WO 00/44895; Zernicka-Goetz et al., International PCT Publication No. WO 01/36646; Fire, International PCT Publication No. WO 99/32619; Plaetinck et al., International PCT Publication No. WO 00/01846; Mello and Fire, International PCT Publication No. WO 01/29058; Deschamps-Depaillette, International PCT Publication No. WO 99/07409; and Li et al., International PCT Publication No. WO 00/44914; Allshire, 2002, Science, 297, 1818-1819; Volpe et al., 2002, Science, 297, 1833-1837; Jenuwein, 2002, Science, 297, 2215-2218; and Hall et al., 2002, Science, 297, 2232-2237; Hutvagner and Zamore, 2002, Science, 297, 2056-60; McManus et al., 2002, RNA, 8, 842-850; Reinhart et al., 2002, Gene & Dev., 16, 1616-1626; and Reinhart & Bartel, 2002, Science, 297, 1831).

[0172] An siNA nucleic acid molecule can be assembled from two separate polynucleotide strands, where one strand is the sense strand and the other is the antisense strand in which the antisense and sense strands are self-complementary (i.e. each strand includes nucleotide sequence that is complementary to nucleotide sequence in the other strand); such as where the antisense strand and sense strand form a duplex or double stranded structure having any length and structure as described herein for nucleic acid molecules as provided, for example wherein the double stranded region (duplex region) is about 15 to about 49 (e.g., about 17, 18, 19, 20, 21, 22, 23, 24, 25, 26, 27, 28, 29, 30, 31, 32, 33, 34, 35, 36, 37, 38, 39, 40, 41, 42, 43, 44, 45, 46, 47, 48, or 49 base pairs); the antisense strand includes nucleotide sequence that is complementary to nucleotide sequence in a target nucleic acid molecule (i.e., TIMP1 and TIMP2 mRNA) or a portion thereof and the sense strand includes nucleotide sequence corresponding to the target nucleic acid sequence or a portion thereof (e.g., about 17 to about 49 or more nucleotides of the nucleic acid molecules herein are complementary to the target nucleic acid or a portion thereof).

[0173] In certain aspects and embodiments a nucleic acid molecule (e.g., a siNA molecule) provided herein may be a “RISC length” molecule or may be a Dicer substrate as described in more detail below.

[0174] An siNA nucleic acid molecule may include separate sense and antisense sequences or regions, where the sense and antisense regions are covalently linked by nucleotide or non-nucleotide linkers molecules as is known in the art, or are alternately non-covalently linked by ionic interactions, hydrogen bonding, van der Waals interactions, hydrophobic interactions, and/or stacking interactions. Nucleic acid molecules may include a nucleotide sequence that is complementary to nucleotide sequence of a target gene. Nucleic acid molecules may interact with nucleotide sequence of a target gene in a manner that causes inhibition of expression of the target gene.

[0175] Alternatively, an siNA nucleic acid molecule is assembled from a single polynucleotide, where the self-complementary sense and antisense regions of the nucleic acid molecules are linked by means of a nucleic acid based or non-nucleic acid-based linker(s), i.e., the antisense strand and the sense strand are part of one single polynucleotide that having an antisense region and sense region that fold to form a duplex region (for example to form a “hairpin” structure as is well known in the art). Such siNA nucleic acid molecules can be a polynucleotide with a duplex, asymmetric duplex, hairpin or asymmetric hairpin secondary structure, having self-complementary sense and antisense regions, wherein the antisense region includes nucleotide sequence that is complementary to nucleotide sequence in a separate target nucleic acid molecule or a portion thereof and the sense region having nucleotide sequence corresponding to the target nucleic acid sequence (e.g., a sequence of TIMP1 and TIMP2 mRNA). Such siNA nucleic acid molecules can be a circular single-stranded polynucleotide having two or more loop structures and a stem comprising self-complementary sense and antisense regions, wherein the antisense region includes nucleotide sequence that is complementary to nucleotide sequence in a target nucleic acid molecule or a portion thereof and the sense region having nucleotide sequence corresponding to the target nucleic acid sequence or a portion thereof, and wherein the circular polynucleotide can be processed either in vivo or in vitro to generate an active nucleic acid molecule capable of mediating RNAi.

[0176] The following nomenclature is often used in the art to describe lengths and overhangs of siNA molecules and may be used throughout the specification and Examples. Names given to duplexes indicate the length of the oligomers and the presence or absence of overhangs. For example, a “21+2” duplex contains two nucleic acid strands both of which are 21 nucleotides in length, also termed a 21-mer siRNA duplex or a 21-mer nucleic acid and having a 2 nucleotides 3′-overhang. A “21-2” design refers to a 21-mer nucleic acid duplex with a 2 nucleotides 5′-overhang. A 21-0 design is a 21-mer nucleic acid duplex with no overhangs (blunt). A “21+2UU” is a 21-mer duplex with 2-nucleotides 3′-overhang and the terminal 2 nucleotides at the 3′-ends are both U residues (which may result in mismatch with target sequence). The aforementioned nomenclature can be applied to siNA molecules of various lengths of strands, duplexes and overhangs (such as 19-0, 21+2, 27+2, and the like). In an alternative but similar nomenclature, a “ 25/27” is an asymmetric duplex having a 25 base sense strand and a 27 base antisense strand with a 2-nucleotides 3′-overhang. A “ 27/25” is an asymmetric duplex having a 27 base sense strand and a 25 base antisense strand.

### Chemical Modifications

[0177] In certain aspects and embodiments, nucleic acid molecules (e.g., siNA molecules) as provided herein include one or more modifications (or chemical modifications). In certain embodiments, such modifications include any changes to a nucleic acid molecule or polynucleotide that would make the molecule different than a standard ribonucleotide or RNA molecule (i.e., that includes standard adenine, cytosine, uracil, or guanine moieties); which may be referred to as an “unmodified” ribonucleotide or unmodified ribonucleic acid. Traditional DNA bases and polynucleotides having a 2′-deoxy sugar represented by adenine, cytosine, thymine, or guanine moieties may be referred to as an “unmodified deoxyribonucleotide” or “unmodified deoxyribonucleic acid”; accordingly, the term “unmodified nucleotide” or “unmodified nucleic acid” as used herein refers to an “unmodified ribonucleotide” or “unmodified ribonucleic acid” unless there is a clear indication to the contrary. Such modifications can be in the nucleotide sugar, nucleotide base, nucleotide phosphate group and/or the phosphate backbone of a polynucleotide.

[0178] In certain embodiments modifications as disclosed herein may be used to increase RNAi activity of a molecule and/or to increase the in vivo stability of the molecules, particularly the stability in serum, and/or to increase bioavailability of the molecules. Non-limiting examples of modifications include without limitation internucleotide or internucleoside linkages; deoxyribonucleotides or dideoxyribonucleotides at any position and strand of the nucleic acid molecule; nucleic acid (e.g., ribonucleic acid) with a modification at the 2′-position preferably selected from an amino, fluoro, methoxy, alkoxy and alkyl; 2′-deoxyribonucleotides, 2′-O-methyl ribonucleotides, 2′-deoxy-2′-fluoro ribonucleotides, “universal base” nucleotides, “acyclic” nucleotides, 5-C-methyl nucleotides, biotin group, and terminal glyceryl and/or inverted deoxy abasic residue incorporation, sterically hindered molecules, such as fluorescent molecules and the like. Other nucleotides modifiers could include 3′-deoxyadenosine (cordycepin), 3′-azido-3′-deoxythymidine (AZT), 2′,3′-dideoxyinosine (ddI), 2′,3′-dideoxy-3′-thiacytidine (3TC), 2′,3′-didehydro-2′,3′-dideoxythymidi-ne (d4T) and the monophosphate nucleotides of 3′-azido-3′-deoxythymidine (AZT), 2′,3′-dideoxy-3′-thiacytidine (3TC) and 2′,3′-didehydro-2′,3′-dide-oxythymidine (d4T). Further details on various modifications are described in more detail below.

[0179] Modified nucleotides include those having a Northern conformation (e.g., Northern pseudorotation cycle, see for example Saenger, Principles of Nucleic Acid Structure, Springer-Verlag ed., 1984). Non-limiting examples of nucleotides having a northern configuration include locked nucleic acid (LNA) nucleotides (e.g., 2′-O, 4′-C-methylene-(D-ribofuranosyl)nucleotides); 2′-methoxyethoxy (MOE) nucleotides; 2′-methyl-thio-ethyl, 2′-deoxy-2′-fluoro nucleotides, 2′-deoxy-2′-chloro nucleotides, 2′-azido nucleotides, and 2′-O-methyl nucleotides. Locked nucleic acids, or LNA's are described, for example, in Elman et al., 2005; Kurreck et al., 2002; Crinelli et al., 2002; Braasch and Corey, 2001; Bondensgaard et al., 2000; Wahlestedt et al., 2000; and International Patent Publication Nos. WO 00/47599, WO 99/14226, and WO 98/39352 and WO 2004/083430. In one embodiment, an LNA is incorporated at the 5′ terminus of the sense strand.

[0180] Chemical modifications also include unlocked nucleic acids, or UNAs, which are non-nucleotide, acyclic analogues, in which the C2′-C3′ bond is not present (although UNAs are not truly nucleotides, they are expressly included in the scope of “modified” nucleotides or modified nucleic acids as contemplated herein). In particular embodiments, nucleic acid molecules with an overhang may be modified to have UNAs at the overhang positions (i.e., 2 nucleotide overhand). In other embodiments, UNAs are included at the 3′- or 5′-ends. A UNA may be located anywhere along a nucleic acid strand, i.e. at position 7. Nucleic acid molecules may contain one or more than UNA. Exemplary UNAs are disclosed in Nucleic Acids Symposium Series No. 52 p. 133-134 (2008). In certain embodiments a nucleic acid molecule (e.g., a siNA molecule) as described herein include one or more UNAs; or one UNA. In some embodiments, a nucleic acid molecule (e.g., a siNA molecule) as described herein that has a 3′-overhang include one or two UNAs in the 3′ overhang. In some embodiments a nucleic acid molecule (e.g., a siNA molecule) as described herein includes a UNA (for example one UNA) in the antisense strand; for example in position 6 or position 7 of the antisense strand. Chemical modifications also include non-pairing nucleotide analogs, for example as disclosed herein. Chemical modifications further include unconventional moieties as disclosed herein.

[0181] Chemical modifications also include terminal modifications on the 5′ and/or 3′ part of the oligonucleotides and are also known as capping moieties. Such terminal modifications are selected from a nucleotide, a modified nucleotide, a lipid, a peptide, and a sugar.

[0182] Chemical modifications also include six membered “six membered ring nucleotide analogs.” Examples of six-membered ring nucleotide analogs are disclosed in Allart, et al (Nucleosides & Nucleotides, 1998, 17:1523-1526; and Perez-Perez, et al., 1996, Bioorg. and Medicinal Chem Letters 6:1457-1460) Oligonucleotides including 6-membered ring nucleotide analogs including hexitol and altritol nucleotide monomers are disclosed in International patent application publication No. WO 2006/047842.

[0183] Chemical modifications also include “mirror” nucleotides which have a reversed chirality as compared to normal naturally occurring nucleotide; that is a mirror nucleotide may be an “L-nucleotide” analogue of naturally occurring D-nucleotide (see U.S. Pat. No. 6,602,858). Mirror nucleotides may further include at least one sugar or base modification and/or a backbone modification, for example, as described herein, such as a phosphorothioate or phosphonate moiety. U.S. Pat. No. 6,602,858 discloses nucleic acid catalysts including at least one L-nucleotide substitution. Mirror nucleotides include for example L-DNA (L-deoxyriboadenosine-3′-phosphate (mirror dA); L-deoxyribocytidine-3′-phosphate (mirror dC); L-deoxyriboguanosine-3′-phosphate (mirror dG); L-deoxyribothymidine-3′-phosphate (mirror image dT)) and L-RNA (L-riboadenosine-3′-phosphate (mirror rA); L-ribocytidine-3′-phosphate (mirror rC); L-riboguanosine-3′-phosphate (mirror rG); L-ribouracil-3′-phosphate (mirror dU).

[0184] In some embodiments, modified ribonucleotides include modified deoxyribonucleotides, for example 5′OMe DNA (5-methyl-deoxyriboguanosine-3′-phosphate) which may be useful as a nucleotide in the 5′ terminal position (position number 1); PACE (deoxyriboadenine 3′ phosphonoacetate, deoxyribocytidine 3′ phosphonoacetate, deoxyriboguanosine 3′ phosphonoacetate, deoxyribothymidine 3′ phosphonoacetate.

[0185] Modifications may be present in one or more strands of a nucleic acid molecule disclosed herein, e.g., in the sense strand, the antisense strand, or both strands. In certain embodiments, the antisense strand may include modifications and the sense strand my only include unmodified RNA.

### Nucleobases

[0186] Nucleobases of the nucleic acid disclosed herein may include unmodified ribonucleotides (purines and pyrimidines) such as adenine, guanine, cytosine, uridine. The nucleobases in one or both strands can be modified with natural and synthetic nucleobases such as thymine, xanthine, hypoxanthine, inosine, 2-aminoadenine, 6-methyl and other alkyl derivatives of adenine and guanine, any “universal base” nucleotides; 2-propyl and other alkyl derivatives of adenine and guanine, 5-halouracil and cytosine, 5-propynyl uracil and cytosine, 6-azo uracil, cytosine and thymine, 5-uracil (pseudouracil), 4-thiouracil, 8-halo, amino, thiol, thioalkyl, hydroxyl and other 8-substituted adenines and guanines, 5-trifluoromethyl and other 5-substituted uracils and cytosines, 7-methylguanine, deazapurines, heterocyclic substituted analogs of purines and pyrimidines, e.g., aminoethyoxy phenoxazine, derivatives of purines and pyrimidines (e.g., 1-alkyl-, 1-alkenyl-, heteroaromatic- and 1-alkynyl derivatives) and tautomers thereof, 8-oxo-N6-methyladenine, 7-diazaxanthine, 5-methylcytosine, 5-methyluracil, 5-(1-propynyl)uracil, 5-(1-propynyl)cytosine and 4,4-ethanocytosine). Other examples of suitable bases include non-purinyl and non-pyrimidinyl bases such as 2-aminopyridine and triazines.

### Sugar Moieties

[0187] Sugar moieties in nucleic acid disclosed herein may include 2′-hydroxyl-pentofuranosyl sugar moiety without any modification. Alternatively, sugar moieties can be modified such as, 2′-deoxy-pentofuranosyl sugar moiety, D-ribose, hexose, modification at the 2′ position of the pentofuranosyl sugar moiety such as 2′-O-alkyl (including 2′-O-methyl and 2′-O-ethyl), i.e., 2′-alkoxy, 2′-amino, 2′-O-allyl, 2′-S-alkyl, 2′-halogen (including 2′-fluoro, chloro, and bromo), 2′-methoxyethoxy, 2′-O-methoxyethyl, 2′-O-2-methoxyethyl, 2′-allyloxy (—OCH₂CH═CH₂), 2′-propargyl, 2′-propyl, ethynyl, propenyl, CF, cyano, imidazole, carboxylate, thioate, C₁ to C₁₀ lower alkyl, substituted lower alkyl, alkaryl or aralkyl, OCF₃, OCN, O-, S-, or N-alkyl; O-, S, or N-alkenyl; SOCH₃; SO₂CH₃; ONO₂; NO₂, N₃; heterozycloalkyl; heterozycloalkaryl; aminoalkylamino; polyalkylamino or substituted silyl, as, among others, for example as described in European patents EP 0 586 520 B1 or EP 0 618 925 B1.

[0188] Alkyl group includes saturated aliphatic groups, including straight-chain alkyl groups (e.g., methyl, ethyl, propyl, butyl, pentyl, hexyl, heptyl, octyl, nonyl, decyl, etc.), branched-chain alkyl groups (isopropyl, tert-butyl, isobutyl, etc.), cycloalkyl (alicyclic) groups (cyclopropyl, cyclopentyl, cyclohexyl, cycloheptyl, cyclooctyl), alkyl substituted cycloalkyl groups, and cycloalkyl substituted alkyl groups. In certain embodiments, a straight chain or branched chain alkyl has 6 or fewer carbon atoms in its backbone (e.g., C₁-C₆ for straight chain, C₃-C₆ for branched chain), and more preferably 4 or fewer. Likewise, preferred cycloalkyls may have from 3-8 carbon atoms in their ring structure, and more preferably have 5 or 6 carbons in the ring structure. The term C₁-C₆ includes alkyl groups containing 1 to 6 carbon atoms. The alkyl group can be substituted alkyl group such as alkyl moieties having substituents replacing a hydrogen on one or more carbons of the hydrocarbon backbone. Such substituents can include, for example, alkenyl, alkynyl, halogen, hydroxyl, alkylcarbonyloxy, arylcarbonyloxy, alkoxycarbonyloxy, aryloxycarbonyloxy, carboxylate, alkylcarbonyl, arylcarbonyl, alkoxycarbonyl, aminocarbonyl, alkylaminocarbonyl, dialkylaminocarbonyl, alkylthiocarbonyl, alkoxyl, phosphate, phosphonato, phosphinato, cyano, amino (including alkyl amino, dialkylamino, arylamino, diarylamino, and alkylarylamino), acylamino (including alkylcarbonylamino, arylcarbonylamino, carbamoyl and ureido), amidino, imino, sulfhydryl, alkylthio, arylthio, thiocarboxylate, sulfates, alkylsulfinyl, sulfonato, sulfamoyl, sulfonamido, nitro, trifluoromethyl, cyano, azido, heterocyclyl, alkylaryl, or an aromatic or heteroaromatic moiety.

[0189] Alkoxy group includes substituted and unsubstituted alkyl, alkenyl, and alkynyl groups covalently linked to an oxygen atom. Examples of alkoxy groups include methoxy, ethoxy, isopropyloxy, propoxy, butoxy, and pentoxy groups. Examples of substituted alkoxy groups include halogenated alkoxy groups. The alkoxy groups can be substituted with groups such as alkenyl, alkynyl, halogen, hydroxyl, alkylcarbonyloxy, arylcarbonyloxy, alkoxycarbonyloxy, aryloxycarbonyloxy, carboxylate, alkylcarbonyl, arylcarbonyl, alkoxycarbonyl, aminocarbonyl, alkylaminocarbonyl, dialkylaminocarbonyl, alkylthiocarbonyl, alkoxyl, phosphate, phosphonato, phosphinato, cyano, amino (including alkyl amino, dialkylamino, arylamino, diarylamino, and alkylarylamino), acylamino (including alkylcarbonylamino, arylcarbonylamino, carbamoyl and ureido), amidino, imino, sulfhydryl, alkylthio, arylthio, thiocarboxylate, sulfates, alkylsulfinyl, sulfonato, sulfamoyl, sulfonamido, nitro, trifluoromethyl, cyano, azido, heterocyclyl, alkylaryl, or an aromatic or heteroaromatic moieties. Examples of halogen substituted alkoxy groups include, but are not limited to, fluoromethoxy, difluoromethoxy, trifluoromethoxy, chloromethoxy, dichloromethoxy, trichloromethoxy, etc.

[0190] In some embodiments, the pentafuronosyl ring may be replaced with acyclic derivatives lacking the C2′-C3′-bond of the pentafuronosyl ring. For example, acyclonucleotides may substitute a 2-hydroxyethoxymethyl group for-the 2′-deoxyribofuranosyl sugar normally present in dNMPs.

[0191] Halogens include fluorine, bromine, chlorine, iodine.

### Backbone

[0192] The nucleoside subunits of the nucleic acid disclosed herein may be linked to each other by phosphodiester bond. The phosphodiester bond may be optionally substituted with other linkages. For example, phosphorothioate, thiophosphate-D-ribose entities, triester, thioate, 2′-5′ bridged backbone (may also be referred to as 5′-2′), PACE, 3′-(or -5′)deoxy-3′-(or -5′)thio-phosphorothioate, phosphorodithioate, phosphoroselenates, 3′-(or -5′)deoxy phosphinates, borano phosphates, 3′-(or -5′)deoxy-3′-(or 5′-)amino phosphoramidates, hydrogen phosphonates, phosphonates, borano phosphate esters, phosphoramidates, alkyl or aryl phosphonates and phosphotriester modifications such as alkylphosphotriesters, phosphotriester phosphorus linkages, 5′-ethoxyphosphodiester, P-alkyloxyphosphotriester, methylphosphonate, and nonphosphorus containing linkages for example, carbonate, carbamate, silyl, sulfur, sulfonate, sulfonamide, formacetal, thioformacetyl, oxime, methyleneimino, methylenemethylimino, methylenehydrazo, methylenedimethylhydrazo and methyleneoxymethylimino linkages.

[0193] Nucleic acid molecules disclosed herein may include a peptide nucleic acid (PNA) backbone. The PNA backbone is includes repeating N-(2-aminoethyl)-glycine units linked by peptide bonds. The various bases such as purine, pyrimidine, natural and synthetic bases are linked to the backbone by methylene carbonyl bonds.

### Terminal Phosphates

[0194] Modifications can be made at terminal phosphate groups. Non-limiting examples of different stabilization chemistries can be used, e.g., to stabilize the 3′-end of nucleic acid sequences, including (1) [3-3′]-inverted deoxyribose; (2) deoxyribonucleotide; (3) [5′-3′]-3′-deoxyribonucleotide; (4) [5′-3′]-ribonucleotide; (5) [5′-3′]-3′-O-methyl ribonucleotide; (6) 3′-glyceryl; (7) [3′-5′]-3′-deoxyribonucleotide; (8) [3′-3′]-deoxyribonucleotide; (9) [5′-2′]-deoxyribonucleotide; and (10) [5-3′]-dideoxyribonucleotide. In addition to unmodified backbone chemistries can be combined with one or more different backbone modifications described herein.

[0195] Exemplary chemically modified terminal phosphate groups include those shown below:

[chemical structure]

### Conjugates

[0196] Modified nucleotides and nucleic acid molecules (e.g., siNA molecules) as provided herein may include conjugates, for example, a conjugate covalently attached to the chemically-modified nucleic acid molecule. Non-limiting examples of conjugates include conjugates and ligands described in Vargeese et al., U.S. Ser. No. 10/427,160. The conjugate may be covalently attached to a nucleic acid molecule (such as an siNA molecule) via a biodegradable linker. The conjugate molecule may be attached at the 3′-end of either the sense strand, the antisense strand, or both strands of the chemically-modified nucleic acid molecule.

[0197] The conjugate molecule may be attached at the 5′-end of either the sense strand, the antisense strand, or both strands of the chemically-modified nucleic acid molecule. The conjugate molecule may be attached both the 3′-end and 5′-end of either the sense strand, the antisense strand, or both strands of the chemically-modified nucleic acid molecule, or any combination thereof. In one embodiment, a conjugate molecule may include a molecule that facilitates delivery of a chemically-modified nucleic acid molecule into a biological system, such as a cell. In another embodiment, the conjugate molecule attached to the chemically-modified nucleic acid molecule is a polyethylene glycol, human serum albumin, or a ligand for a cellular receptor that can mediate cellular uptake. Examples of specific conjugate molecules contemplated by herein that can be attached to chemically-modified nucleic acid molecules are described in Vargeese et al., U.S. Ser. No. 10/201,394.

### Linkers

[0198] A nucleic acid molecule provided herein (e.g., an siNA) molecule may include a nucleotide, non-nucleotide, or mixed nucleotide/non-nucleotide linker that joins the sense region of the nucleic acid to the antisense region of the nucleic acid. A nucleotide linker can be a linker of ≧2 nucleotides in length, for example about 3, 4, 5, 6, 7, 8, 9, or 10 nucleotides in length. The nucleotide linker can be a nucleic acid aptamer. By “aptamer” or “nucleic acid aptamer” as used herein refers to a nucleic acid molecule that binds specifically to a target molecule wherein the nucleic acid molecule has sequence that includes a sequence recognized by the target molecule in its natural setting. Alternately, an aptamer can be a nucleic acid molecule that binds to a target molecule (such as TIMP1 and TIMP2 mRNA) where the target molecule does not naturally bind to a nucleic acid. For example, the aptamer can be used to bind to a ligand-binding domain of a protein, thereby preventing interaction of the naturally occurring ligand with the protein. This is a non-limiting example and those in the art will recognize that other embodiments can be readily generated using techniques generally known in the art. See e.g., Gold et al.; 1995, Annu Rev. Biochem., 64, 763; Brody and Gold, 2000, J. Biotechnol., 74, 5; Sun, 2000, Curr. Opin. Mol. Ther., 2, 100; Kusser, 2000, J. Biotechnol., 74, 27; Hermann and Patel, 2000, Science, 287, 820; and Jayasena, 1999, Clinical Chemistry, 45, 1628.

[0199] A non-nucleotide linker may include an abasic nucleotide, polyether, polyamine, polyamide, peptide, carbohydrate, lipid, polyhydrocarbon, or other polymeric compounds (e.g. polyethylene glycols such as those having between 2 and 100 ethylene glycol units). Specific examples include those described by Seela and Kaiser, Nucleic Acids Res. 1990, 18:6353 and Nucleic Acids Res. 1987, 15:3113; Cload and Schepartz, J. Am. Chem. Soc. 1991, 113:6324; Richardson and Schepartz, J. Am. Chem. Soc. 1991, 113:5109; Ma et al., Nucleic Acids Res. 1993, 21:2585 and Biochemistry 1993, 32:1751; Durand et al., Nucleic Acids Res. 1990, 18:6353; McCurdy et al., Nucleosides & Nucleotides 1991, 10:287; Jschke et al., Tetrahedron Lett. 1993, 34:301; Ono et al., Biochemistry 1991, 30:9914; Arnold et al., International Publication No. WO 89/02439; Usman et al., International Publication No. WO 95/06731; Dudycz et al., International Publication No. WO 95/11910 and Ferentz and Verdine, J. Am. Chem. Soc. 1991, 113:4000.

### 5′ Ends, 3′ Ends and Overhangs

[0200] Nucleic acid molecules disclosed herein (e.g., siNA molecules) may be blunt-ended on both sides, have overhangs on both sides or a combination of blunt and overhang ends. Overhangs may occur on either the 5′- or 3′-end of the sense or antisense strand.

[0201] 5′- and/or 3′-ends of double stranded nucleic acid molecules (e.g., siNA) may be blunt ended or have an overhang. The 5′-end may be blunt ended and the 3′-end has an overhang in either the sense strand or the antisense strand. In other embodiments, the 3′-end may be blunt ended and the 5′-end has an overhang in either the sense strand or the antisense strand. In yet other embodiments, both the 5′- and 3′-end are blunt ended or both the 5′- and 3′-ends have overhangs.

[0202] The 5′- and/or 3′-end of one or both strands of the nucleic acid may include a free hydroxyl group. The 5′- and/or 3′-end of any nucleic acid molecule strand may be modified to include a chemical modification. Such modification may stabilize nucleic acid molecules, e.g., the 3′-end may have increased stability due to the presence of the nucleic acid molecule modification. Examples of end modifications (e.g., terminal caps) include, but are not limited to, abasic, deoxy abasic, inverted (deoxy) abasic, glyceryl, dinucleotide, acyclic nucleotide, amino, fluoro, chloro, bromo, CN, CF, methoxy, imidazole, carboxylate, thioate, C₁ to C₁₀ lower alkyl, substituted lower alkyl, alkaryl or aralkyl, OCF₃, OCN, O-, S-, or N-alkyl; O-, S-, or N-alkenyl; SOCH₃; SO₂CH₃; ONO₂; NO₂, N₃; heterocycloalkyl; heterocycloalkaryl; aminoalkylamino; polyalkylamino or substituted silyl, as, among others, described in European patents EP 586,520 and EP 618,925 and other modifications disclosed herein.

[0203] Nucleic acid molecules include those with blunt ends, i.e., ends that do not include any overhanging nucleotides. A nucleic acid molecule can include one or more blunt ends. The blunt ended nucleic acid molecule has a number of base pairs equal to the number of nucleotides present in each strand of the nucleic acid molecule. The nucleic acid molecule can include one blunt end, for example where the 5′-end of the antisense strand and the 3′-end of the sense strand do not have any overhanging nucleotides. Nucleic acid molecule may include one blunt end, for example where the 3′-end of the antisense strand and the 5′-end of the sense strand do not have any overhanging nucleotides. A nucleic acid molecule may include two blunt ends, for example where the 3′-end of the antisense strand and the 5′-end of the sense strand as well as the 5′-end of the antisense strand and 3′-end of the sense strand do not have any overhanging nucleotides. Other nucleotides present in a blunt ended nucleic acid molecule can include, for example, mismatches, bulges, loops, or wobble base pairs to modulate the activity of the nucleic acid molecule to mediate RNA interference.

[0204] In certain embodiments of the nucleic acid molecules (e.g., siNA molecules) provided herein, at least one end of the molecule has an overhang of at least one nucleotide (for example 1 to 8 overhang nucleotides). For example, one or both strands of a double stranded nucleic acid molecule disclosed herein may have an overhang at the 5′-end or at the 3′-end or both. An overhang may be present at either or both the sense strand and antisense strand of the nucleic acid molecule. The length of the overhang may be as little as one nucleotide and as long as 1 to 8 or more nucleotides (e.g., 1, 2, 3, 4, 5, 6, 7 or 8 nucleotides; in some preferred embodiments an overhang is 2, 3, 4, 5, 6, 7 or 8 nucleotides; for example an overhang may be 2 nucleotides. The nucleotide(s) forming the overhang may be include deoxyribonucleotide(s), ribonucleotide(s), natural and non-natural nucleobases or any nucleotide modified in the sugar, base or phosphate group such as disclosed herein. A double stranded nucleic acid molecule may have both 5′- and 3′-overhangs. The overhangs at the 5′- and 3′-end may be of different lengths. An overhang may include at least one nucleic acid modification which may be deoxyribonucleotide. One or more deoxyribonucleotides may be at the 5′-terminal. The 3′-end of the respective counter-strand of the nucleic acid molecule may not have an overhang, more preferably not a deoxyribonucleotide overhang. The one or more deoxyribonucleotide may be at the 3′-terminal. The 5′-end of the respective counter-strand of the dsRNA may not have an overhang, more preferably not a deoxyribonucleotide overhang. The overhang in either the 5′- or the 3′-end of a strand may be 1 to 8 (e.g., about 1, 2, 3, 4, 5, 6, 7 or 8) unpaired nucleotides, preferably, the overhang is 2-3 unpaired nucleotides; more preferably 2 unpaired nucleotides. Nucleic acid molecules may include duplex nucleic acid molecules with overhanging ends of about 1 to about 20 (e.g., about 1, 2, 3, 4, 5, 6, 7, 8, 9, 10, 11, 12, 13, 1, 15, 16, 17, 18, 19 or 20); preferably 1-8 (e.g., about 1, 2, 3, 4, 5, 6, 7 or 8) nucleotides, for example, about 21-nucleotide duplexes with about 19 base pairs and 3′-terminal mononucleotide, dinucleotide, or trinucleotide overhangs. Nucleic acid molecules herein may include duplex nucleic acid molecules with blunt ends, where both ends are blunt, or alternatively, where one of the ends is blunt. Nucleic acid molecules disclosed herein can include one or more blunt ends, i.e. where a blunt end does not have any overhanging nucleotides. In one embodiment, the blunt ended nucleic acid molecule has a number of base pairs equal to the number of nucleotides present in each strand of the nucleic acid molecule. The nucleic acid molecule may include one blunt end, for example where the 5′-end of the antisense strand and the 3′-end of the sense strand do not have any overhanging nucleotides. The nucleic acid molecule may include one blunt end, for example where the 3′-end of the antisense strand and the 5′-end of the sense strand do not have any overhanging nucleotides. A nucleic acid molecule may include two blunt ends, for example where the 3′-end of the antisense strand and the 5′-end of the sense strand as well as the 5′-end of the antisense strand and 3′-end of the sense strand do not have any overhanging nucleotides. In certain preferred embodiments the nucleic acid compounds are blunt ended. Other nucleotides present in a blunt ended siNA molecule can include, for example, mismatches, bulges, loops, or wobble base pairs to modulate the activity of the nucleic acid molecule to mediate RNA interference.

[0205] In many embodiments one or more, or all, of the overhang nucleotides of a nucleic acid molecule (e.g., a siNA molecule) as described herein includes are modified such as described herein; for example one or more, or all, of the nucleotides may be 2′-deoxyribonucleotides.

### Amount, Location and Patterns of Modifications.

[0206] Nucleic acid molecules (e.g., siNA molecules) disclosed herein may include modified nucleotides as a percentage of the total number of nucleotides present in the nucleic acid molecule. As such, a nucleic acid molecule may include about 5% to about 100% modified nucleotides (e.g., about 5%, 10%, 15%, 20%, 25%, 30%, 35%, 40%, 45%, 50%, 55%, 60%, 65%, 70%, 75%, 80%, 85%, 90%, 95% or 100% modified nucleotides). The actual percentage of modified nucleotides present in a given nucleic acid molecule will depend on the total number of nucleotides present in the nucleic acid. If the nucleic acid molecule is single stranded, the percent modification can be based upon the total number of nucleotides present in the single stranded nucleic acid molecule. Likewise, if the nucleic acid molecule is double stranded, the percent modification can be based upon the total number of nucleotides present in the sense strand, antisense strand, or both the sense and antisense strands.

[0207] Nucleic acid molecules disclosed herein may include unmodified RNA as a percentage of the total nucleotides in the nucleic acid molecule. As such, a nucleic acid molecule may include about 5% to about 100% modified nucleotides (e.g., about 5%, 10%, 15%, 20%, 25%, 30%, 35%, 40%, 45%, 50%, 55%, 60%, 65%, 70%, 75%, 80%, 85%, 90%, 95% or 100% of total nucleotides present in a nucleic acid molecule.

[0208] A nucleic acid molecule (e.g., an siNA molecule) may include a sense strand that includes about 1 to about 5, specifically about 1, 2, 3, 4, or 5 phosphorothioate internucleotide linkages, and/or one or more (e.g., about 1, 2, 3, 4, 5, or more) 2′-deoxy, 2′-O-methyl, 2′-deoxy-2′-fluoro, and/or one or more (e.g., about 1, 2, 3, 4, 5, or more) universal base modified nucleotides, and optionally a terminal cap molecule at the 3-end, the 5′-end, or both of the 3′- and 5′-ends of the sense strand; and wherein the antisense strand includes about 1 to about 5 or more, specifically about 1, 2, 3, 4, 5, or more phosphorothioate internucleotide linkages, and/or one or more (e.g., about 1, 2, 3, 4, 5, 6, 7, 8, 9, 10 or more) 2′-deoxy, 2′-O-methyl, 2′-deoxy-2′-fluoro, and/or one or more (e.g., about 1, 2, 3, 4, 5, 6, 7, 8, 9, 10 or more) universal base modified nucleotides, and optionally a terminal cap molecule at the 3′-end, the 5′-end, or both of the 3′- and 5′-ends of the antisense strand. A nucleic acid molecule may include about 1, 2, 3, 4, 5, 6, 7, 8, 9, 10, or more, pyrimidine nucleotides of the sense and/or antisense nucleic acid strand are chemically-modified with 2′-deoxy, 2′-O-methyl and/or 2′-deoxy-2′-fluoro nucleotides, with or without about 1 to about 5 or more, for example about 1, 2, 3, 4, 5, or more phosphorothioate internucleotide linkages and/or a terminal cap molecule at the 3′-end, the 5′-end, or both of the 3′- and 5′-ends, being present in the same or different strand.

[0209] A nucleic acid molecule may include about 1 to about 5 or more (specifically about 1, 2, 3, 4, 5 or more) phosphorothioate internucleotide linkages in each strand of the nucleic acid molecule.

[0210] A nucleic acid molecule may include 2′-5′ internucleotide linkages, for example at the 3′-end, the 5′-end, or both of the 3′- and 5′-ends of one or both nucleic acid sequence strands. In addition, the 2′-5′ internucleotide linkage(s) can be present at various other positions within one or both nucleic acid sequence strands, for example, about 1, 2, 3, 4, 5, 6, 7, 8, 9, 10, or more including every internucleotide linkage of a pyrimidine nucleotide in one or both strands of the siNA molecule can include a 2′-5′ internucleotide linkage, or about 1, 2, 3, 4, 5, 6, 7, 8, 9, 10, or more including every internucleotide linkage of a purine nucleotide in one or both strands of the siNA molecule can include a 2′-5′ internucleotide linkage.

[0211] A chemically-modified short interfering nucleic acid (siNA) molecule may include an antisense region, wherein any (e.g., one or more or all) pyrimidine nucleotides present in the antisense region are 2′-deoxy-2′-fluoro pyrimidine nucleotides (e.g., wherein all pyrimidine nucleotides are 2′-deoxy-2′-fluoro pyrimidine nucleotides or alternately a plurality of pyrimidine nucleotides are 2′-deoxy-2′-fluoro pyrimidine nucleotides), and wherein any (e.g., one or more or all) purine nucleotides present in the antisense region are 2′-deoxy purine nucleotides (e.g., wherein all purine nucleotides are 2′-deoxy purine nucleotides or alternately a plurality of purine nucleotides are 2′-deoxy purine nucleotides).

[0212] A chemically-modified short interfering nucleic acid (siNA) molecule may include an antisense region, wherein any (e.g., one or more or all) pyrimidine nucleotides present in the antisense region are 2′-deoxy-2′-fluoro pyrimidine nucleotides (e.g., wherein all pyrimidine nucleotides are 2′-deoxy-2′-fluoro pyrimidine nucleotides or alternately a plurality of pyrimidine nucleotides are 2′-deoxy-2′-fluoro pyrimidine nucleotides), and wherein any (e.g., one or more or all) purine nucleotides present in the antisense region are 2′-O-methyl purine nucleotides (e.g., wherein all purine nucleotides are 2′-O-methyl purine nucleotides or alternately a plurality of purine nucleotides are 2′-O-methyl purine nucleotides).

[0213] A chemically-modified short interfering nucleic acid (siNA) molecule capable of mediating RNA interference (RNAi) against TIMP1 and TIMP2 inside a cell or reconstituted in vitro system may include a sense region, wherein one or more pyrimidine nucleotides present in the sense region are 2′-deoxy-2′-fluoro pyrimidine nucleotides (e.g., wherein all pyrimidine nucleotides are 2′-deoxy-2′-fluoro pyrimidine nucleotides or alternately a plurality of pyrimidine nucleotides are 2′-deoxy-2′-fluoro pyrimidine nucleotides), and one or more purine nucleotides present in the sense region are 2′-deoxy purine nucleotides (e.g., wherein all purine nucleotides are 2′-deoxy purine nucleotides or alternately a plurality of purine nucleotides are 2′-deoxy purine nucleotides), and an antisense region, wherein one or more pyrimidine nucleotides present in the antisense region are 2′-deoxy-2′-fluoro pyrimidine nucleotides (e.g., wherein all pyrimidine nucleotides are 2′-deoxy-2′-fluoro pyrimidine nucleotides or alternately a plurality of pyrimidine nucleotides are 2′-deoxy-2′-fluoro pyrimidine nucleotides), and one or more purine nucleotides present in the antisense region are 2′-O-methyl purine nucleotides (e.g., wherein all purine nucleotides are 2′-O-methyl purine nucleotides or alternately a plurality of purine nucleotides are 2′-O-methyl purine nucleotides). The sense region and/or the antisense region can have a terminal cap modification, such as any modification, that is optionally present at the 3′-end, the 5′-end, or both of the 3′ and 5′-ends of the sense and/or antisense sequence. The sense and/or antisense region can optionally further include a 3′-terminal nucleotide overhang having about 1 to about 4 (e.g., about 1, 2, 3, or 4) 2′-deoxyribonucleotides. The overhang nucleotides can further include one or more (e.g., about 1, 2, 3, 4 or more) phosphorothioate, phosphonoacetate, and/or thiophosphonoacetate internucleotide linkages. The purine nucleotides in the sense region may alternatively be 2′-O-methyl purine nucleotides (e.g., wherein all purine nucleotides are 2′-O-methyl purine nucleotides or alternately a plurality of purine nucleotides are 2′-O-methyl purine nucleotides) and one or more purine nucleotides present in the antisense region are 2′-O-methyl purine nucleotides (e.g., wherein all purine nucleotides are 2′-O-methyl purine nucleotides or alternately a plurality of purine nucleotides are 2′-O-methyl purine nucleotides). One or more purine nucleotides in the sense region may alternatively be purine ribonucleotides (e.g., wherein all purine nucleotides are purine ribonucleotides or alternately a plurality of purine nucleotides are purine ribonucleotides) and any purine nucleotides present in the antisense region are 2′-O-methyl purine nucleotides (e.g., wherein all purine nucleotides are 2′-O-methyl purine nucleotides or alternately a plurality of purine nucleotides are 2′-O-methyl purine nucleotides). One or more purine nucleotides in the sense region and/or present in the antisense region may alternatively selected from the group consisting of 2′-deoxy nucleotides, locked nucleic acid (LNA) nucleotides, 2′-methoxyethyl nucleotides, 4′-thionucleotides, and 2′-O-methyl nucleotides (e.g., wherein all purine nucleotides are selected from the group consisting of 2′-deoxy nucleotides, locked nucleic acid (LNA) nucleotides, 2′-methoxyethyl nucleotides, 4′-thionucleotides, and 2′-O-methyl nucleotides or alternately a plurality of purine nucleotides are selected from the group consisting of 2′-deoxy nucleotides, locked nucleic acid (LNA) nucleotides, 2′-methoxyethyl nucleotides, 4′-thionucleotides, and 2′-O-methyl nucleotides).

[0214] In some embodiments, a nucleic acid molecule (e.g., a siNA molecule) as described herein includes a modified nucleotide (for example one modified nucleotide) in the antisense strand; for example in position 6 or position 7 of the antisense strand.

### Modification Patterns and Alternating Modifications

[0215] Nucleic acid molecules (e.g., siNA molecules) provided herein may have patterns of modified and unmodified nucleic acids. A pattern of modification of the nucleotides in a contiguous stretch of nucleotides may be a modification contained within a single nucleotide or group of nucleotides that are covalently linked to each other via standard phosphodiester bonds or, at least partially, through phosphorothioate bonds. Accordingly, a “pattern” as contemplated herein, does not necessarily need to involve repeating units, although it may. Examples of modification patterns that may be used in conjunction with the nucleic acid molecules (e.g., siNA molecules) provided herein include those disclosed in Giese, U.S. Pat. No. 7,452,987. For example, nucleic acid molecules (e.g., siNA molecules) provided herein include those having modification patters such as, similar to, or the same as, the patterns shown diagrammatically in FIG. 2 of the Giese U.S. Pat. No. 7,452,987.

[0216] A modified nucleotide or group of modified nucleotides may be at the 5′-end or 3′-end of the sense or antisense strand, a flanking nucleotide or group of nucleotides is arrayed on both sides of the modified nucleotide or group, where the flanking nucleotide or group either is unmodified or does not have the same modification of the preceding nucleotide or group of nucleotides. The flanking nucleotide or group of nucleotides may, however, have a different modification. This sequence of modified nucleotide or group of modified nucleotides, respectively, and unmodified or differently modified nucleotide or group of unmodified or differently modified nucleotides may be repeated one or more times.

[0217] In some patterns, the 5′-terminal nucleotide of a strand is a modified nucleotide while in other patterns the 5′-terminal nucleotide of a strand is an unmodified nucleotide. In some patterns, the 5′-end of a strand starts with a group of modified nucleotides while in other patterns, the 5′-terminal end is an unmodified group of nucleotides. This pattern may be either on the first stretch or the second stretch of the nucleic acid molecule or on both.

[0218] Modified nucleotides of one strand of the nucleic acid molecule may be complementary in position to the modified or unmodified nucleotides or groups of nucleotides of the other strand.

[0219] There may be a phase shift between modifications or patterns of modifications on one strand relative to the pattern of modification of the other strand such that the modification groups do not overlap. In one instance, the shift is such that the modified group of nucleotides of the sense strand corresponds to the unmodified group of nucleotides of the antisense strand and vice versa.

[0220] There may be a partial shift of the pattern of modification such that the modified groups overlap. The groups of modified nucleotides in any given strand may optionally be the same length, but may be of different lengths. Similarly, groups of unmodified nucleotides in any given strand may optionally be the same length, or of different lengths.

[0221] In some patterns, the second (penultimate) nucleotide at the terminus of the strand, is an unmodified nucleotide or the beginning of group of unmodified nucleotides. Preferably, this unmodified nucleotide or unmodified group of nucleotides is located at the 5′-end of the either or both the sense and antisense strands and even more preferably at the terminus of the sense strand. An unmodified nucleotide or unmodified group of nucleotide may be located at the 5′-end of the sense strand. In a preferred embodiment the pattern consists of alternating single modified and unmodified nucleotides.

[0222] In some double stranded nucleic acid molecules include a 2′-O-methyl modified nucleotide and a non-modified nucleotide, preferably a nucleotide which is not 2′-O-methyl modified, are incorporated on both strands in an alternating fashion, resulting in a pattern of alternating 2′-O-methyl modified nucleotides and nucleotides that are either unmodified or at least do not include a 2′-O-methyl modification. In certain embodiments, the same sequence of 2′-O-methyl modification and non-modification exists on the second strand; in other embodiments the alternating 2′-O-methyl modified nucleotides are only present in the sense strand and are not present in the antisense strand; and in yet other embodiments the alternating 2′-O-methyl modified nucleotides are only present in the sense strand and are not present in the antisense strand. In certain embodiments, there is a phase shift between the two strands such that the 2′-O-methyl modified nucleotide on the first strand base pairs with a non-modified nucleotide(s) on the second strand and vice versa. This particular arrangement, i.e. base pairing of 2′-O-methyl modified and non-modified nucleotide(s) on both strands is particularly preferred in certain embodiments. In certain embodiments, the pattern of alternating 2′-O-methyl modified nucleotides exists throughout the entire nucleic acid molecule; or the entire duplex region. In other embodiments the pattern of alternating 2′-O-methyl modified nucleotides exists only in a portion of the nucleic acid; or the entire duplex region.

[0223] In “phase shift” patterns, it may be preferred if the antisense strand starts with a 2′-O-methyl modified nucleotide at the 5′ end whereby consequently the second nucleotide is non-modified, the third, fifth, seventh and so on nucleotides are thus again 2′-O-methyl modified whereas the second, fourth, sixth, eighth and the like nucleotides are non-modified nucleotides.

[0224] Exemplary Modification Locations and Patterns

[0225] While exemplary patterns are provided in more detail below, all permutations of patterns with of all possible characteristics of the nucleic acid molecules disclosed herein and those known in the art are contemplated (e.g., characteristics include, but are not limited to, length of sense strand, length of antisense strand, length of duplex region, length of hangover, whether one or both ends of a double stranded nucleic acid molecule is blunt or has an overhang, location of modified nucleic acid, number of modified nucleic acids, types of modifications, whether a double overhang nucleic acid molecule has the same or different number of nucleotides on the overhang of each side, whether a one or more than one type of modification is used in a nucleic acid molecule, and number of contiguous modified/unmodified nucleotides). With respect to all detailed examples provided below, while the duplex region is shown to be 19 nucleotides, the nucleic acid molecules provided herein can have a duplex region ranging from 1 to 49 nucleotides in length as each strand of a duplex region can independently be 17-49 nucleotides in length Exemplary patterns are provided herein.

[0226] Nucleic acid molecules may have a blunt end (when n is 0) on both ends that include a single or contiguous set of modified nucleic acids. The modified nucleic acid may be located at any position along either the sense or antisense strand. Nucleic acid molecules may include a group of about 1, 2, 3, 4, 5, 6, 7, 8, 9, 10, 11, 12, 13, 14, 15, 16, 17, 18, 19, 20, 21, 22, 23, 24, 25, 26, 27, 28, 29, 30, 31, 32, 33, 34, 35, 36, 37, 38, 39, 40, 41, 42, 43, 44, 45, 46, 47, 48 or 49 contiguous modified nucleotides. Modified nucleic acids may make up 1%, 2%, 3%, 5%, 10%, 15%, 20%, 25%, 30%, 35%, 40%, 45%, 50%, 55%, 60%, 65%, 70%, 75%, 80%, 85%, 90%, 95%, 97%, 98% or 100% of a nucleic acid strand. Modified nucleic acids of the examples immediately below may be in the sense strand only, the antisense strand only, or in both the sense and antisense strand.

[0227] General nucleic acid patters are shown below where X=sense strand nucleotide in the duplex region; Xₐ=5′-overhang nucleotide in the sense strand; X_{b}=3′-overhang nucleotide in the sense strand; Y=antisense strand nucleotide in the duplex region; Yₐ=3′-overhang nucleotide in the antisense strand; Y_{b}=5′-overhang nucleotide in the antisense strand; and M=a modified nucleotide in the duplex region. Each a and b are independently 0 to 8 (e.g., 0, 1, 2, 3, 4, 5, 6, 7 or 8). Each X, Y, a and b are independently modified or unmodified. The sense and antisense strands can are each independently 17-49 nucleotides in length. The examples provided below have a duplex region of 19 nucleotides; however, nucleic acid molecules disclosed herein can have a duplex region anywhere between 17 and 49 nucleotides and where each strand is independently between 17 and 49 nucleotides in length.

5′ XₐXXXXXXXXXXXXXXXXXXXX_{b}
3′ Y_{b}YYYYYYYYYYYYYYYYYYYYₐ

[0228] Further exemplary nucleic acid molecule patterns are shown below where X=unmodified sense strand nucleotides; x=an unmodified overhang nucleotide in the sense strand; Y=unmodified antisense strand nucleotides; y=an unmodified overhang nucleotide in the antisense strand; and M=a modified nucleotide. The sense and antisense strands can are each independently 17-49 nucleotides in length. The examples provided below have a duplex region of 19 nucleotides; however, nucleic acid molecules disclosed herein can have a duplex region anywhere between 17 and 49 nucleotides and where each strand is independently between 17 and 49 nucleotides in length.

5′ [symbol] XXXXXXXXXMXXXXXXXXX [symbol]
3′ [symbol] YYYYYYYYYYYYYYYYYYY [symbol]
5′ XXXXXXXXXXXXXXXXXXX
3′ YYYYYYYYYMYYYYYYYYY
5′ XXXXXXXXMMXXXXXXXXX
3′ YYYYYYYYYYYYYYYYYYY
5′ XXXXXXXXXXXXXXXXXXX
3′ YYYYYYYYMMYYYYYYYYY
5′ XXXXXXXXXMXXXXXXXXX
3′ YYYYYYYYYMYYYYYYYYY
5′ XXXXXMXXXXXXXXXXXXX
3′ YYYYYYYYYMYYYYYYYYY
5′ MXXXXXXXXXXXXXXXXXX
3′ YYYYYYYYYYYYMYYYYYY
5′ XXXXXXXXXXXXXXXXXXM
3′ YYYYYMYYYYYYYYYYYYY
5′ XXXXXXXXXMXXXXXXXX
3′ MYYYYYYYYYYYYYYYYY
5′ XXXXXXXMXXXXXXXXXX
3′ YYYYYYYYYYYYYYYYYM
5′ XXXXXXXXXXXXXMXXXX
3′ MYYYYYYYYYYYYYYYYY
5′ MMMMMMMMMMMMMMMMMM
3′ MMMMMMMMMMMMMMMMMM

[0229] Nucleic acid molecules may have blunt ends on both ends with alternating modified nucleic acids. The modified nucleic acids may be located at any position along either the sense or antisense strand.

5′ MXMXMXMXMXMXMXMXMXM
3′ YMYMYMYMYMYMYMYMYMY
5′ XMXMXMXMXMXMXMXMXMX
3′ MYMYMYMYMYMYMYMYMYM
5′ MMXMMXMMXMMXMMXMMXM
3′ YMMYMMYMMYMMYMMYMMY
5′ XMMXMMXMMXMMXMMXMMX
3′ MMYMMYMMYMMYMMYMMYM
5′ MMMXMMMXMMMXMMMXMMM
3′ YMMMYMMMYMMMYMMMYMM
5′ XMMMXMMMXMMMXMMMXMM
3′ MMMYMMMYMMMYMMMYMMM

[0230] Nucleic acid molecules with a blunt 5′-end and 3′-end overhang end with a single modified nucleic acid.

[0231] Nucleic acid molecules with a 5′-end overhang and a blunt 3′-end with a single modified nucleic acid.

[0232] Nucleic acid molecules with overhangs on both ends and all overhangs are modified nucleic acids. In the pattern immediately below, M is n number of modified nucleic acids, where n is an integer from 0 to 8 (i.e., 0, 1, 2, 3, 4, 5, 6, 7 and 8).

5′ XXXXXXXXXXXXXXXXXXXM
3′ MYYYYYYYYYYYYYYYYYYY

[0233] Nucleic acid molecules with overhangs on both ends and some overhang nucleotides are modified nucleotides. In the patterns immediately below, M is n number of modified nucleotides, x is n number of unmodified overhang nucleotides in the sense strand, y is n number of unmodified overhang nucleotides in the antisense strand, where each n is independently an integer from 0 to 8 (i.e., 0, 1, 2, 3, 4, 5, 6, 7 and 8), and where each overhang is maximum of 20 nucleotides; preferably a maximum of 8 nucleotides (modified and/or unmodified).

5′ XXXXXXXXXXXXXXXXXXXM
3′ yYYYYYYYYYYYYYYYYYYY
5′ XXXXXXXXXXXXXXXXXXXMx
3′ yYYYYYYYYYYYYYYYYYYY
5′ XXXXXXXXXXXXXXXXXXXMxM
3′ yYYYYYYYYYYYYYYYYYYY
5′ XXXXXXXXXXXXXXXXXXXMxMx
3′ yYYYYYYYYYYYYYYYYYYY
5′ XXXXXXXXXXXXXXXXXXXMxMxM
3′ yYYYYYYYYYYYYYYYYYYY
5′ XXXXXXXXXXXXXXXXXXXMxMxMx
3′ yYYYYYYYYYYYYYYYYYYY
5′ XXXXXXXXXXXXXXXXXXXMxMxMxM
3′ yYYYYYYYYYYYYYYYYYYY
5′ XXXXXXXXXXXXXXXXXXXMxMxMxMx
3′ yYYYYYYYYYYYYYYYYYYY
5′ MXXXXXXXXXXXXXXXXXXX
3′ YYYYYYYYYYYYYYYYYYYy
5′ xMXXXXXXXXXXXXXXXXXXX
3′ YYYYYYYYYYYYYYYYYYYy
5′ MxMXXXXXXXXXXXXXXXXXXX
3′ YYYYYYYYYYYYYYYYYYYy
5′ xMxMXXXXXXXXXXXXXXXXXXX
3′ YYYYYYYYYYYYYYYYYYYy
5′ MxMxMXXXXXXXXXXXXXXXXXXX
3′ YYYYYYYYYYYYYYYYYYYy
5′ xMxMxMXXXXXXXXXXXXXXXXXXX
3′ YYYYYYYYYYYYYYYYYYYy
5′ MxMxMxMXXXXXXXXXXXXXXXXXXX
3′ YYYYYYYYYYYYYYYYYYYy
5′ xMxMxMxMXXXXXXXXXXXXXXXXXXX
3′ YYYYYYYYYYYYYYYYYYYy
5′ xXXXXXXXXXXXXXXXXXXX
3′ YYYYYYYYYYYYYYYYYYYM
5′ xXXXXXXXXXXXXXXXXXXX
3′ YYYYYYYYYYYYYYYYYYYMy
5′ xXXXXXXXXXXXXXXXXXXX
3′ YYYYYYYYYYYYYYYYYYYMyM
5′ xXXXXXXXXXXXXXXXXXXX
3′ YYYYYYYYYYYYYYYYYYYMyMy
5′ xXXXXXXXXXXXXXXXXXXX
3′ YYYYYYYYYYYYYYYYYYYMyMyM
5′ xXXXXXXXXXXXXXXXXXXX
3′ YYYYYYYYYYYYYYYYYYYMyMyMy
5′ xXXXXXXXXXXXXXXXXXXX
3′ YYYYYYYYYYYYYYYYYYYMyMyMyM
5′ xXXXXXXXXXXXXXXXXXXX
3′ YYYYYYYYYYYYYYYYYYYMyMyMyMy
5′ XXXXXXXXXXXXXXXXXXXx
3′ MYYYYYYYYYYYYYYYYYYY
5′ XXXXXXXXXXXXXXXXXXXx
3′ yMYYYYYYYYYYYYYYYYYYY
5′ XXXXXXXXXXXXXXXXXXXx
3′ MyMYYYYYYYYYYYYYYYYYYY
5′ XXXXXXXXXXXXXXXXXXXx
3′ yMyMYYYYYYYYYYYYYYYYYYY
5′ XXXXXXXXXXXXXXXXXXXx
3′ MyMyMYYYYYYYYYYYYYYYYYYY
5′ XXXXXXXXXXXXXXXXXXXx
3′ yMyMyMYYYYYYYYYYYYYYYYYYY
5′ XXXXXXXXXXXXXXXXXXXx
3′ MyMyMyMYYYYYYYYYYYYYYYYYYY
5′ XXXXXXXXXXXXXXXXXXXx
3′ yMyMyMyMYYYYYYYYYYYYYYYYYYY

[0234] Modified nucleotides at the 3′ end of the sense region.

5′ XXXXXXXXXXXXXXXXXXXM
3′ YYYYYYYYYYYYYYYYYYY
5′ XXXXXXXXXXXXXXXXXXXMM
3′ YYYYYYYYYYYYYYYYYYY
5′ XXXXXXXXXXXXXXXXXXXMMM
3′ YYYYYYYYYYYYYYYYYYY
5′ XXXXXXXXXXXXXXXXXXXMMMM
3′ YYYYYYYYYYYYYYYYYYY
5′ XXXXXXXXXXXXXXXXXXXMMMMM
3′ YYYYYYYYYYYYYYYYYYY
5′ XXXXXXXXXXXXXXXXXXXMMMMMM
3′ YYYYYYYYYYYYYYYYYYY
5′ XXXXXXXXXXXXXXXXXXXMMMMMMMM
3′ YYYYYYYYYYYYYYYYYYY
5′ XXXXXXXXXXXXXXXXXXXMMMMMMMM
3′ YYYYYYYYYYYYYYYYYYY

[0235] Overhang at the 5′ end of the sense region.

5′ MXXXXXXXXXXXXXXXXXXX
3′ YYYYYYYYYYYYYYYYYYY
5′ MMXXXXXXXXXXXXXXXXXXX
3′ YYYYYYYYYYYYYYYYYYY
5′ MMMXXXXXXXXXXXXXXXXXXX
3′ YYYYYYYYYYYYYYYYYYY
5′ MMMMXXXXXXXXXXXXXXXXXXX
3′ YYYYYYYYYYYYYYYYYYY
5′ MMMMMXXXXXXXXXXXXXXXXXXX
3′ YYYYYYYYYYYYYYYYYYY
5′ MMMMMMXXXXXXXXXXXXXXXXXXX
3′ YYYYYYYYYYYYYYYYYYY
5′ MMMMMMMXXXXXXXXXXXXXXXXXXX
3′ YYYYYYYYYYYYYYYYYYY
5′ MMMMMMMMXXXXXXXXXXXXXXXXXXX
3′ YYYYYYYYYYYYYYYYYYY

[0236] Overhang at the 3′ end of the antisense region.

5′ XXXXXXXXXXXXXXXXXXX
3′ MYYYYYYYYYYYYYYYYYYY
5′ XXXXXXXXXXXXXXXXXXX
3′ MMYYYYYYYYYYYYYYYYYYY
5′ XXXXXXXXXXXXXXXXXXX
3′ MMMYYYYYYYYYYYYYYYYYYY
5′ XXXXXXXXXXXXXXXXXXX
3′ MMMMYYYYYYYYYYYYYYYYYYY
5′ XXXXXXXXXXXXXXXXXXX
3′ MMMMMYYYYYYYYYYYYYYYYYYY
5′ XXXXXXXXXXXXXXXXXXX
3′ MMMMMMYYYYYYYYYYYYYYYYYYY
5′ XXXXXXXXXXXXXXXXXXX
3′ MMMMMMMYYYYYYYYYYYYYYYYYYY
5′ XXXXXXXXXXXXXXXXXXX
3′ MMMMMMMMYYYYYYYYYYYYYYYYYYY

[0237] Modified nucleotide(s) within the sense region

5′ XXXXXXXXXMXXXXXXXXX
3′ YYYYYYYYYYYYYYYYYYY
5′ XXXXXXXXXXXXXXXXXXX
3′ YYYYYYYYYMYYYYYYYYY
5′ XXXXXXXXXXXXXXXXXXXMM
3′ YYYYYYYYYYYYYYYYYYY
5′ XXXXXXXXXXXXXXXXXXX
3′ MMYYYYYYYYYYYYYYYYYYY

[0238] Exemplary nucleic acid molecules are provided below with the equivalent general structure in line with the symbols used above. The following duplexes are in accordance with the pattern:

5′ XXXXXXXXXXXXXXXXXXXMM
3′ MMYYYYYYYYYYYYYYYYYYY

[0239] TIMP1-A siRNA to human, mouse, rat and rhesus TIMP1 having a 19 nucleotide (i.e., 19mer) duplex region and modified 2 nucleotide (i.e., deoxynucleotide) overhangs at the 3′-ends of the sense and antisense strands.

5′ CCACCUUAUACCAGCGUUATT 3′
3′ TTGGUGGAAUAUGGUCGCAAU 5′

[0240] TIMP1-B siRNA to human and rhesus TIMP1 having a 19 nucleotide (i.e., 19mer) duplex region and modified 2 nucleotide (i.e., deoxynucleotide) overhangs at the 3′-ends of the sense and antisense strands.

5′ CACUGUUGGCUGUGAGGAATT 3′
3′ TTGUGACAACCGACACUCCUU 5′

[0241] TIMP1-C siRNA to human, mouse, rat and rhesus TIMP1 having a 19 nucleotide (i.e., 19mer) duplex region and modified 2 nucleotide (i.e., deoxynucleotide) overhangs at the 3′-ends of the sense and antisense strands.

5′ GGAAUAUCUCAUUGCAGGATT 3′
3′ TTCCUUAUAGAGUAACGUCCU 5′

[0242] TIMP2-A siRNA to human TIMP2 having a 19 nucleotide (i.e., 19mer) duplex region and modified 2 nucleotide (i.e., deoxynucleotide) overhangs at the 3′-ends of the sense and antisense strands.

5′ UGCAGAUGUAGUGAUCAGGTT 3′
3′ TTACGUCUACAUCACUAGUCC 5′

[0243] TIMP2-B siRNA to human, rhesus and rabbit TIMP2 having a 19 nucleotide (i.e., 19mer) duplex region and modified 2 nucleotide (i.e., deoxynucleotide) overhangs at the 3′-ends of the sense and antisense strands.

5′ GAGGAUCCAGUAUGAGAUCTT 3′
3′ TTCUCCUAGGUCAUACUCUAG 5′

[0244] TIMP2-C siRNA to human, mouse, rat, cow, dog and pig TIMP2 having a 19 nucleotide (i.e., 19mer) duplex region and modified 2 nucleotide (i.e., deoxynucleotide) overhangs at the 3′-ends of the sense and antisense strands.

5′ GCAGAUAAAGAUGUUCAAATT 3′
3′ TTCGUCUAUUUCUACAAGUUU 5′

[0245] TIMP2-D siRNA to human TIMP2 having a 19 nucleotide (i.e., 19mer) duplex region and modified 2 nucleotide (i.e., deoxynucleotide) overhangs at the 3′-ends of the sense and antisense strands.

5′ UAUCUCAUUGCAGGAAAGGTT 3′
3′ TTAUAGAGUAACGUCCUUUCC 5′

[0246] TIMP2-E siRNA to human TIMP2 having a 19 nucleotide (i.e., 19mer) duplex region and modified 2 nucleotide (i.e., deoxynucleotide) overhangs at the 3′-ends of the sense and antisense strands.

5′ GCACAGUGUUUCCCUGUUUTT 3′
3′ TTCGUGUCACAAAGGGACAAA 5′

### Nicks and Gaps in Nucleic Acid Strands

[0247] Nucleic acid molecules (e.g., siNA molecules) provided herein may have a strand, preferably the sense strand, that is nicked or gapped. As such, nucleic acid molecules may have three or more strand, for example, such as a meroduplex RNA (mdRNA) disclosed in International Patent Application No. PCT/US07/081,836. Nucleic acid molecules with a nicked or gapped strand may be between about 1-49 nucleotides, or may be RISC length (e.g., about 15 to 25 nucleotides) or Dicer substrate length (e.g., about 25 to 30 nucleotides) such as disclosed herein.

[0248] Nucleic acid molecules with three or more strands include, for example, an ‘A’ (antisense) strand, ‘S1’ (second) strand, and ‘S2’ (third) strand in which the ‘S1’ and ‘S2’ strands are complementary to and form base pairs with non-overlapping regions of the ‘A’ strand (e.g., an mdRNA can have the form of A:S1S2). The S1, S2, or more strands together form what is substantially similar to a sense strand to the ‘A’ antisense strand. The double-stranded region formed by the annealing of the ‘S1’ and ‘A’ strands is distinct from and non-overlapping with the double-stranded region formed by the annealing of the ‘S2’ and ‘A’ strands. An nucleic acid molecule (e.g., an siNA molecule) may be a “gapped” molecule, meaning a “gap” ranging from 0 nucleotides up to about 10 nucleotides (e.g., 0, 1, 2, 3, 4, 5, 6, 7, 8, 9 or 10 nucleotides). Preferably, the sense strand is gapped. In some embodiments, the A:S1 duplex is separated from the A:S2 duplex by a gap resulting from at least one unpaired nucleotide (up to about 10 unpaired nucleotides) in the ‘A’ strand that is positioned between the A:S1 duplex and the A:S2 duplex and that is distinct from any one or more unpaired nucleotide at the 3′-end of one or more of the ‘A’, ‘S1’, or ‘S2 strands. The A:S1 duplex may be separated from the A:B2 duplex by a gap of zero nucleotides (i.e., a nick in which only a phosphodiester bond between two nucleotides is broken or missing in the polynucleotide molecule) between the A:S1 duplex and the A:S2 duplex-which can also be referred to as nicked dsRNA (ndsRNA). For example, A:S1S2 may be include a dsRNA having at least two double-stranded regions that combined total about 14 base pairs to about 40 base pairs and the double-stranded regions are separated by a gap of about 0 to about 10 nucleotides, optionally having blunt ends, or A:S1S2 may include a dsRNA having at least two double-stranded regions separated by a gap of up to 10 nucleotides wherein at least one of the double-stranded regions includes between about 5 base pairs and 13 base pairs.

### Dicer Substrates

[0249] In certain embodiments, the nucleic acid molecules (e.g., siNA molecules) provided herein may be a precursor “Dicer substrate” molecule, e.g., double stranded nucleic acid, processed in vivo to produce an active nucleic acid molecules, for example as described in Rossi, US Patent App. No. 20050244858. In certain conditions and situations, it has been found that these relatively longer dsRNA siNA species, e.g., of from about 25 to about 30 nucleotides, can give unexpectedly effective results in terms of potency and duration of action. Without wishing to be bound by any particular theory, it is thought that the longer dsRNA species serve as a substrate for the enzyme Dicer in the cytoplasm of a cell. In addition to cleaving double stranded nucleic acid into shorter segments, Dicer may facilitate the incorporation of a single-stranded cleavage product derived from the cleaved dsRNA into the RNA-induced silencing complex (RISC complex) that is responsible for the destruction of the cytoplasmic RNA derived from the target gene.

[0250] Dicer substrates may have certain properties which enhance its processing by Dicer. Dicer substrates are of a length sufficient such that it is processed by Dicer to produce an active nucleic acid molecule and may further include one or more of the following properties: (i) the dsRNA is asymmetric, e.g., has a 3′ overhang on the first strand (antisense strand) and (ii) the dsRNA has a modified 3′ end on the antisense strand (sense strand) to direct orientation of Dicer binding and processing of the dsRNA to an active siRNA. In certain embodiments, the longest strand in the Dicer substrate may be 24-30 nucleotides.

[0251] Dicer substrates may be symmetric or asymmetric. The Dicer substrate may have a sense strand includes 22-28 nucleotides and the antisense strand may include 24-30 nucleotides; thus, in some embodiments the resulting Dicer substrate may have an overhang on the 3′ end of the antisense strand. Dicer substrate may have a sense strand 25 nucleotides in length, and the antisense strand having 27 nucleotides in length with a 2 base 3′-overhang. The overhang may be 1-3 nucleotides, for example 2 nucleotides. The sense strand may also have a 5′ phosphate.

[0252] An asymmetric Dicer substrate may further contain two deoxyribonucleotides at the 3′-end of the sense strand in place of two of the ribonucleotides. Some exemplary Dicer substrates lengths and structures are 21+0, 21+2, 21−2, 22+0, 22+1, 22−1, 23+0, 23+2, 23−2, 24+0, 24+2, 24−2, 25+0, 25+2, 25−2, 26+0, 26+2, 26−2, 27+0, 27+2, and 27−2.

[0253] The sense strand of a Dicer substrate may be between about 22 to about 30 (e.g., about 22, 23, 24, 25, 26, 27, 28, 29 or 30); about 22 to about 28; about 24 to about 30; about 25 to about 30; about 26 to about 30; about 26 and 29; or about 27 to about 28 nucleotides in length. In certain preferred embodiments Dicer substrates contain sense and antisense strands, that are at least about 25 nucleotides in length and no longer than about 30 nucleotides; between about 26 and 29 nucleotides; or 27 nucleotides in length. The sense and antisense strands may be the same length (blunt ended), different lengths (have overhangs), or a combination. The sense and antisense strands may exist on the same polynucleotide or on different polynucleotides. A Dicer substrate may have a duplex region of about 19, 20, 21, 22, 23, 24, 25 or 27 nucleotides.

[0254] Like other siNA molecules provided herein, the antisense strand of a Dicer substrate may have any sequence that anneals to the antisense strand under biological conditions, such as within the cytoplasm of a eukaryotic cell.

[0255] Dicer substrates may have any modifications to the nucleotide base, sugar or phosphate backbone as known in the art and/or as described herein for other nucleic acid molecules (such as siNA molecules). In certain embodiments, Dicer substrates may have a sense strand is modified for Dicer processing by suitable modifiers located at the 3′ end of the sense strand, i.e., the dsRNA is designed to direct orientation of Dicer binding and processing. Suitable modifiers include nucleotides such as deoxyribonucleotides, dideoxyribonucleotides, acyclonucleotides and the like and sterically hindered molecules, such as fluorescent molecules and the like. Acyclonucleotides substitute a 2-hydroxyethoxymethyl group for-the 2′-deoxyribofuranosyl sugar normally present in dNMPs. Other nucleotides modifiers that could be used in Dicer substrate siNA molecules include 3′-deoxyadenosine (cordycepin), 3′-azido-3′-deoxythymidine (AZT), 2′,3′-dideoxyinosine (ddI), 2′,3′-dideoxy-3′-thiacytidine (3TC), 2′,3′-didehydro-2′,3′-dideoxythymidi-ne (d4T) and the monophosphate nucleotides of 3′-azido-3′-deoxythymidine (AZT), 2′,3′-dideoxy-3′-thiacytidine (3TC) and 2′,3′-didehydro-2′,3′-dide-oxythymidine (d4T). In one embodiment, deoxyribonucleotides are used as the modifiers. When nucleotide modifiers are utilized, they may replace ribonucleotides (e.g., 1-3 nucleotide modifiers, or 2 nucleotide modifiers are substituted for the ribonucleotides on the 3′ end of the sense strand) such that the length of the Dicer substrate does not change. When sterically hindered molecules are utilized, they may be attached to the ribonucleotide at the 3′ end of the antisense strand. Thus, in certain embodiments the length of the strand does not change with the incorporation of the modifiers. In certain embodiments, two DNA bases in the dsRNA are substituted to direct the orientation of Dicer processing of the antisense strand. In a further embodiment of, two terminal DNA bases are substituted for two ribonucleotides on the 3′-end of the sense strand forming a blunt end of the duplex on the 3′ end of the sense strand and the 5′ end of the antisense strand, and a two-nucleotide RNA overhang is located on the 3′-end of the antisense strand. This is an asymmetric composition with DNA on the blunt end and RNA bases on the overhanging end.

[0256] In certain embodiments modifications are included in the Dicer substrate such that the modification does not prevent the nucleic acid molecule from serving as a substrate for Dicer. In one embodiment, one or more modifications are made that enhance Dicer processing of the Dicer substrate. One or more modifications may be made that result in more effective RNAi generation. One or more modifications may be made that support a greater RNAi effect. One or more modifications are made that result in greater potency per each Dicer substrate to be delivered to the cell. Modifications may be incorporated in the 3′-terminal region, the 5′-terminal region, in both the 3′-terminal and 5′-terminal region or at various positions within the sequence. Any number and combination of modifications can be incorporated into the Dicer substrate so long as the modification does not prevent the nucleic acid molecule from serving as a substrate for Dicer. Where multiple modifications are present, they may be the same or different. Modifications to bases, sugar moieties, the phosphate backbone, and their combinations are contemplated. Either 5′-terminus can be phosphorylated.

[0257] Examples of Dicer substrate phosphate backbone modifications include phosphonates, including methylphosphonate, phosphorothioate, and phosphotriester modifications such as alkylphosphotriesters, and the like. Examples of Dicer substrate sugar moiety modifications include 2′-alkyl pyrimidine, such as 2′-O-methyl, 2′-fluoro, amino, and deoxy modifications and the like (see, e.g., Amarzguioui et al., 2003). Examples of Dicer substrate base group modifications include abasic sugars, 2-O-alkyl modified pyrimidines, 4-thiouracil, 5-bromouracil, 5-iodouracil, and 5-(3-aminoallyl)-uracil and the like. Locked nucleic acids, or LNA's, could also be incorporated.

[0258] The sense strand may be modified for Dicer processing by suitable modifiers located at the 3′ end of the sense strand, i.e., the Dicer substrate is designed to direct orientation of Dicer binding and processing. Suitable modifiers include nucleotides such as deoxyribonucleotides, dideoxyribonucleotides, acyclonucleotides and the like and sterically hindered molecules, such as fluorescent molecules and the like. Acyclonucleotides substitute a 2-hydroxyethoxymethyl group for-the 2′-deoxyribofuranosyl sugar normally present in dNMPs. Other nucleotides modifiers could include 3′-deoxyadenosine (cordycepin), 3′-azido-3′-deoxythymidine (AZT), 2′,3′-dideoxyinosine (ddI), 2′,3′-dideoxy-3′-thiacytidine (3TC), 2′,3′-didehydro-2′,3′-dideoxythymidi-ne (d4T) and the monophosphate nucleotides of 3′-azido-3′-deoxythymidine (AZT), 2′,3′-dideoxy-3′-thiacytidine (3TC) and 2′,3′-didehydro-2′,3′-dide-oxythymidine (d4T). In one embodiment, deoxyribonucleotides are used as the modifiers. When nucleotide modifiers are utilized, 1-3 nucleotide modifiers, or 2 nucleotide modifiers are substituted for the ribonucleotides on the 3′ end of the sense strand. When sterically hindered molecules are utilized, they are attached to the ribonucleotide at the 3′ end of the antisense strand. Thus, the length of the strand does not change with the incorporation of the modifiers. In another embodiment, substituting two DNA bases in the Dicer substrate to direct the orientation of Dicer processing of the antisense strand is contemplated. In a further embodiment of the present invention, two terminal DNA bases are substituted for two ribonucleotides on the 3′-end of the sense strand forming a blunt end of the duplex on the 3′ end of the sense strand and the 5′ end of the antisense strand, and a two-nucleotide RNA overhang is located on the 3′-end of the antisense strand. This is an asymmetric composition with DNA on the blunt end and RNA bases on the overhanging end.

[0259] The antisense strand may be modified for Dicer processing by suitable modifiers located at the 3′ end of the antisense strand, i.e., the dsRNA is designed to direct orientation of Dicer binding and processing. Suitable modifiers include nucleotides such as deoxyribonucleotides, dideoxyribonucleotides, acyclonucleotides and the like and sterically hindered molecules, such as fluorescent molecules and the like. Acyclonucleotides substitute a 2-hydroxyethoxymethyl group for the 2′-deoxyribofuranosyl sugar normally present in dNMPs. Other nucleotide modifiers could include 3′-deoxyadenosine (cordycepin), 3′-azido-3′-deoxythymidine (AZT), 2′,3′-dideoxyinosine (ddI), 2′,3′-dideoxy-3′-thiacytidine (3TC), 2′,3′-didehydro-2′,3′-dideoxythymidi-ne (d4T) and the monophosphate nucleotides of 3′-azido-3′-deoxythymidine (AZT), 2′,3′-dideoxy-3′-thiacytidine (3TC) and 2′,3′-didehydro-2′,3′-dide-oxythymidine (d4T). In one embodiment, deoxyribonucleotides are used as the modifiers. When nucleotide modifiers are utilized, 1-3 nucleotide modifiers, or 2 nucleotide modifiers are substituted for the ribonucleotides on the 3′ end of the antisense strand. When sterically hindered molecules are utilized, they are attached to the ribonucleotide at the 3′ end of the antisense strand. Thus, the length of the strand does not change with the incorporation of the modifiers. In another embodiment, the two DNA bases in the dsRNA may be substituted to direct the orientation of Dicer processing. In a further embodiment, two terminal DNA bases are located on the 3′ end of the antisense strand in place of two ribonucleotides forming a blunt end of the duplex on the 5′ end of the sense strand and the 3′ end of the antisense strand, and a two-nucleotide RNA overhang is located on the 3′-end of the sense strand. This is an asymmetric composition with DNA on the blunt end and RNA bases on the overhanging end.

[0260] Dicer substrates with a sense and an antisense strand can be linked by a third structure. The third structure will not block Dicer activity on the Dicer substrate and will not interfere with the directed destruction of the RNA transcribed from the target gene. The third structure may be a chemical linking group. Suitable chemical linking groups are known in the art and can be used. Alternatively, the third structure may be an oligonucleotide that links the two oligonucleotides of the dsRNA is a manner such that a hairpin structure is produced upon annealing of the two oligonucleotides making up the Dicer substrate. The hairpin structure preferably does not block Dicer activity on the Dicer substrate or interfere with the directed destruction of the RNA transcribed from the target gene.

[0261] The sense and antisense strands of the Dicer substrate are not required to be completely complementary. They only need to be substantially complementary to anneal under biological conditions and to provide a substrate for Dicer that produces an siRNA sufficiently complementary to the target sequence.

[0262] Dicer substrate can have certain properties that enhance its processing by Dicer. The Dicer substrate can have a length sufficient such that it is processed by Dicer to produce an active nucleic acid molecules (e.g., siRNA) and may have one or more of the following properties: (i) the Dicer substrate is asymmetric, e.g., has a 3′ overhang on the first strand (antisense strand) and (ii) the Dicer substrate has a modified 3′ end on the second strand (sense strand) to direct orientation of Dicer binding and processing of the Dicer substrate to an active siRNA. The Dicer substrate can be asymmetric such that the sense strand includes 22-28 nucleotides and the antisense strand includes 24-30 nucleotides. Thus, the resulting Dicer substrate has an overhang on the 3′ end of the antisense strand. The overhang is 1-3 nucleotides, for example 2 nucleotides. The sense strand may also have a 5′ phosphate.

[0263] A Dicer substrate may have an overhang on the 3′ end of the antisense strand and the sense strand is modified for Dicer processing. The 5′ end of the sense strand may have a phosphate. The sense and antisense strands may anneal under biological conditions, such as the conditions found in the cytoplasm of a cell. A region of one of the strands, particularly the antisense strand, of the Dicer substrate may have a sequence length of at least 19 nucleotides, wherein these nucleotides are in the 21-nucleotide region adjacent to the 3′ end of the antisense strand and are sufficiently complementary to a nucleotide sequence of the RNA produced from the target gene. A Dicer substrate may also have one or more of the following additional properties: (a) the antisense strand has a right shift from a corresponding 21-mer (i.e., the antisense strand includes nucleotides on the right side of the molecule when compared to the corresponding 21-mer), (b) the strands may not be completely complementary, i.e., the strands may contain simple mismatch pairings and (c) base modifications such as locked nucleic acid(s) may be included in the 5′ end of the sense strand.

[0264] An antisense strand of a Dicer substrate nucleic acid molecule may be modified to include 1-9 ribonucleotides on the 5′-end to give a length of 22-28 nucleotides. When the antisense strand has a length of 21 nucleotides, then 1-7 ribonucleotides, or 2-5 ribonucleotides and or 4 ribonucleotides may be added on the 3′-end. The added ribonucleotides may have any sequence. Although the added ribonucleotides may be complementary to the target gene sequence, full complementarity between the target sequence and the antisense strands is not required. That is, the resultant antisense strand is sufficiently complementary with the target sequence. A sense strand may then have 24-30 nucleotides. The sense strand may be substantially complementary with the antisense strand to anneal to the antisense strand under biological conditions. In one embodiment, the antisense strand may be synthesized to contain a modified 3′-end to direct Dicer processing. The sense strand may have a 3′ overhang. The antisense strand may be synthesized to contain a modified 3′-end for Dicer binding and processing and the sense strand has a 3′ overhang.

### TIMP1 and TIMP2

[0265] Exemplary nucleic acid sequence of target tissue inhibitors of metalloproteinase-1 and -2 (human TIMP1 and TIMP2) cDNA is disclosed in GenBank accession numbers: NM_{—}003454 and NM_{—}003455 and the corresponding mRNA sequence, for example as listed as SEQ ID NO: 1 and SEQ ID NO:2. One of ordinary skill in the art would understand that a given sequence may change over time and to incorporate any changes needed in the nucleic acid molecules herein accordingly.

[0266] Expression of TIMP1 and TIMP2 was shown to be increased in fibrotic liver from rats with hepatic fibrosis (Nie, et al 2004. World J. Gastroenterol. 10:86-90). TIMP1 and TIMP2 are potential targets for the treatment of fibrosis.

### Methods and Compositions for Inhibiting TIMP1 and TIMP2

[0267] Provided are compositions and methods for inhibition of TIMP1 and TIMP2 expression by using small nucleic acid molecules, such as short interfering nucleic acid (siNA), interfering RNA (RNAi), short interfering RNA (siRNA), double-stranded RNA (dsRNA), micro-RNA (miRNA), and short hairpin RNA (shRNA) molecules capable of mediating or that mediate RNA interference against TIMP1 and TIMP2 gene expression. The composition and methods disclosed herein are also useful in treating various fibrosis such as liver fibrosis, lung fibrosis, kidney fibrosis and fibrotic conditions shown in Table I, supra.

[0268] Nucleic acid molecule(s) and/or methods as disclosed herein may be used to down regulate the expression of gene(s) that encode RNA referred to, by example, Genbank Accession NM_{—}003254.2 and NM_{—}004255.4.

[0269] Compositions, methods and kits provided herein may include one or more nucleic acid molecules (e.g., siNA) and methods that independently or in combination modulate (e.g., downregulate) the expression of TIMP1 and or TIMP2 protein and/or genes encoding TIMP1 and TIMP2 proteins, proteins and/or genes encoding TIMP1 and TIMP2 associated with the maintenance and/or development of diseases, conditions or disorders associated with TIMP1 and TIMP2, such as liver fibrosis, cirrhosis, pulmonary fibrosis, kidney fibrosis, peritoneal fibrosis, chronic hepatic damage, and fibrillogenesis (e.g., genes encoding sequences comprising those sequences referred to by GenBank Accession Nos. NM-003254 and NM_{—}003255), or a TIMP1 and TIMP2 gene family member where the genes or gene family sequences share sequence homology. The description of the various aspects and embodiments is provided with reference to exemplary genes TIMP1 and TIMP2. However, the various aspects and embodiments are also directed to other related TIMP1 and TIMP2 genes, such as homolog genes and transcript variants, and polymorphisms (e.g., single nucleotide polymorphism, (SNPs)) associated with certain TIMP1 and TIMP2 genes. As such, the various aspects and embodiments are also directed to other genes that are involved in TIMP1 and TIMP2 mediated pathways of signal transduction or gene expression that are involved, for example, in the maintenance or development of diseases, traits, or conditions described herein. These additional genes can be analyzed for target sites using the methods described for the TIMP1 and TIMP2 gene herein. Thus, the modulation of other genes and the effects of such modulation of the other genes can be performed, determined, and measured as described herein.

[0270] In one embodiment, compositions and methods provided herein include a double-stranded short interfering nucleic acid (siNA) molecule that down-regulates expression of a TIMP1 and TIMP2 gene (e.g., human TIMP1 and TIMP2 exemplified by SEQ ID NO:1 and SEQ ID NO:2, respectively), where the nucleic acid molecule includes about 15 to about 49 base pairs.

[0271] In one embodiment, a nucleic acid disclosed may be used to inhibit the expression of the TIMP1 and TIMP2 gene or a TIMP1 and TIMP2 gene family where the genes or gene family sequences share sequence homology. Such homologous sequences can be identified as is known in the art, for example using sequence alignments. Nucleic acid molecules can be designed to target such homologous sequences, for example using perfectly complementary sequences or by incorporating non-canonical base pairs, for example mismatches and/or wobble base pairs, that can provide additional target sequences. In instances where mismatches are identified, non-canonical base pairs (for example, mismatches and/or wobble bases) can be used to generate nucleic acid molecules that target more than one gene sequence. In a non-limiting example, non-canonical base pairs such as UU and CC base pairs are used to generate nucleic acid molecules that are capable of targeting sequences for differing TIMP1 and TIMP2 targets that share sequence homology. As such, one advantage of using siNAs disclosed herein is that a single nucleic acid can be designed to include nucleic acid sequence that is complementary to the nucleotide sequence that is conserved between the homologous genes. In this approach, a single nucleic acid can be used to inhibit expression of more than one gene instead of using more than one nucleic acid molecule to target the different genes.

[0272] Nucleic acid molecules may be used to target conserved sequences corresponding to a gene family or gene families such as TIMP1 and TIMP2 family genes. As such, nucleic acid molecules targeting multiple TIMP1 and TIMP2 targets can provide increased therapeutic effect. In addition, nucleic acid can be used to characterize pathways of gene function in a variety of applications. For example, nucleic acid molecules can be used to inhibit the activity of target gene(s) in a pathway to determine the function of uncharacterized gene(s) in gene function analysis, mRNA function analysis, or translational analysis. The nucleic acid molecules can be used to determine potential target gene pathways involved in various diseases and conditions toward pharmaceutical development. The nucleic acid molecules can be used to understand pathways of gene expression involved in, for example fibroses such as liver, kidney or pulmonary fibrosis, and/or inflammatory and proliferative traits, diseases, disorders, and/or conditions.

[0273] In one embodiment, the compositions and methods provided herein include a nucleic acid molecule having RNAi activity against TIMP1 RNA, where the nucleic acid molecule includes a sequence complementary to any RNA having TIMP1 encoding sequence. In another embodiment, a nucleic acid molecule may have RNAi activity against TIMP1 RNA, where the nucleic acid molecule includes a sequence complementary to an RNA having variant TIMP1 encoding sequence, for example other mutant TIMP1 genes known in the art to be associated with the maintenance and/or development of fibrosis. In another embodiment, a nucleic acid molecule disclosed herein includes a nucleotide sequence that can interact with nucleotide sequence of a TIMP1 gene and thereby mediate silencing of TIMP1 gene expression, for example, wherein the nucleic acid molecule mediates regulation of TIMP1 gene expression by cellular processes that modulate the chromatin structure or methylation patterns of the TIMP1 gene and prevent transcription of the TIMP1 gene.

[0274] In another embodiment the compositions and methods provided herein include a nucleic acid molecule having RNAi activity against TIMP2 RNA, where the nucleic acid molecule includes a sequence complementary to any RNA having TIMP2 encoding sequence, such as those sequences having GenBank Accession No. NM_{—}003455. Nucleic acid molecules may have RNAi activity against TIMP2 RNA, where the nucleic acid molecule includes a sequence complementary to an RNA having variant TIMP2 encoding sequence, for example other mutant TIMP2 genes known in the art to be associated with the maintenance and/or development of fibrosis. Nucleic acid molecules disclosed herein include a nucleotide sequence that can interact with nucleotide sequence of a TIMP2 gene and thereby mediate silencing of TIMP1 gene expression, e.g., where the nucleic acid molecule mediates regulation of TIMP2 gene expression by cellular processes that modulate the chromatin structure or methylation patterns of the TIMP2 gene and prevent transcription of the TIMP2 gene.

### Methods of Treatment

[0275] In one embodiment, nucleic acid molecules may be used to down regulate or inhibit the expression of TIMP1 and/or TIMP1 proteins arising from TIMP1 and/or TIMP1 haplotype polymorphisms that are associated with a disease or condition, (e.g., fibrosis). Analysis of TIMP1 and/or TIMP1 genes, or TIMP1 and/or TIMP1 protein or RNA levels can be used to identify subjects with such polymorphisms or those subjects who are at risk of developing traits, conditions, or diseases described herein. These subjects are amenable to treatment, for example, treatment with nucleic acid molecules disclosed herein and any other composition useful in treating diseases related to TIMP1 and/or TIMP1 gene expression. As such, analysis of TIMP1 and/or TIMP1 protein or RNA levels can be used to determine treatment type and the course of therapy in treating a subject. Monitoring of TIMP1 and/or TIMP1 protein or RNA levels can be used to predict treatment outcome and to determine the efficacy of compounds and compositions that modulate the level and/or activity of certain TIMP1 and/or TIMP1 proteins associated with a trait, condition, or disease.

[0276] In one embodiment, nucleic acid molecules may be used to down regulate or inhibit the expression of TIMP2 and/or TIMP2 proteins arising from TIMP2 and/or TIMP2 haplotype polymorphisms that are associated with a disease or condition, (e.g., fibrosis). Analysis of TIMP2 and/or TIMP2 genes, or TIMP2 and/or TIMP2 protein or RNA levels can be used to identify subjects with such polymorphisms or those subjects who are at risk of developing traits, conditions, or diseases described herein. These subjects are amenable to treatment, for example, treatment with nucleic acid molecules disclosed herein and any other composition useful in treating diseases related to TIMP2 and/or TIMP2 gene expression. As such, analysis of TIMP2 and/or TIMP2 protein or RNA levels can be used to determine treatment type and the course of therapy in treating a subject. Monitoring of TIMP2 and/or TIMP2 protein or RNA levels can be used to predict treatment outcome and to determine the efficacy of compounds and compositions that modulate the level and/or activity of certain TIMP2 and/or TIMP2 proteins associated with a trait, condition, or disease.

[0277] Provided are compositions and methods for inhibition of TIMP1 and TIMP2 expression by using small nucleic acid molecules as provided herein, such as short interfering nucleic acid (siNA), interfering RNA (RNAi), short interfering RNA (siRNA), double-stranded RNA (dsRNA), micro-RNA (miRNA), and short hairpin RNA (shRNA) molecules capable of mediating or that mediate RNA interference against TIMP1 and TIMP2 gene expression. The composition and methods disclosed herein are also useful in treating various fibrosis such as liver fibrosis, lung fibrosis, and kidney fibrosis.

[0278] The nucleic acid molecules disclosed herein individually, or in combination or in conjunction with other drugs, can be use for preventing or treating diseases, traits, conditions and/or disorders associated with TIMP1 and TIMP2, such as liver fibrosis, cirrhosis, pulmonary fibrosis, kidney fibrosis, peritoneal fibrosis, chronic hepatic damage, and fibrillogenesis.

[0279] The nucleic acid molecules disclosed herein are able to inhibit the expression of TIMP1 or TIMP2 in a sequence specific manner. The nucleic acid molecules may include a sense strand and an antisense strand which include contiguous nucleotides that are at least partially complementary (antisense) to a TIMP1 or TIMP2 mRNA.

[0280] In some embodiments, dsRNA specific for TIMP1 or TIMP2 can be used in conjunction with other dsRNA specific for other molecular chaperones that assist in the folding of newly synthesized proteins such as, calnexin, calreticulin, BiP (Bergeron et al. Trends Biochem. Sci. 1994; 19:124-128; Herbert et al. 1995; Cold Spring Harb. Symp. Quant. Biol. 60:405-415)

[0281] Fibrosis can be treated by RNA interference using nucleic acid molecules as disclosed herein. Exemplary fibrosis include liver fibrosis, peritoneal fibrosis, lung fibrosis, kidney fibrosis, vocal cord fibrosis, intestinal fibrosis. The nucleic acid molecules disclosed herein may inhibit the expression of TIMP1 or TIMP2 in a sequence specific manner.

[0282] Treatment of fibrosis can be monitored by determining the level of extracellular collagen using suitable techniques known in the art such as, using anti-collagen I antibodies. Treatment can also be monitored by determining the level of TIMP1 or TIMP2 mRNA or the level of TIMP1 or TIMP2 protein in the cells of the affected tissue. Treatment can also be monitored by non-invasive scanning of the affected organ or tissue such as by computer assisted tomography scan, magnetic resonance elastography scans.

[0283] A method for treating or preventing TIMP1 associated disease or condition in a subject or organism may include contacting the subject or organism with a nucleic acid molecule as provided herein under conditions suitable to modulate the expression of the TIMP1 gene in the subject or organism.

[0284] A method for treating or preventing TIMP2 associated disease or condition in a subject or organism may include contacting the subject or organism with a nucleic acid molecule as provided herein under conditions suitable to modulate the expression of the TIMP2 gene in the subject or organism.

[0285] A method for treating or preventing fibrosis in a subject or organism may include contacting the subject or organism with a nucleic acid molecule under conditions suitable to modulate the expression of the TIMP1 and/or TIMP2 gene in the subject or organism.

[0286] A method for treating or preventing one or more fibroses selected from the group consisting of liver fibrosis, kidney fibrosis, and pulmonary fibrosis in a subject or organism may include contacting the subject or organism with a nucleic acid molecule under conditions suitable to modulate the expression of the TIMP1 and/or TIMP2 gene in the subject or organism.

### Fibrotic Diseases

[0287] Fibrotic diseases are generally characterized by the excess deposition of a fibrous material within the extracellular matrix, which contributes to abnormal changes in tissue architecture and interferes with normal organ function.

[0288] All tissues damaged by trauma respond by the initiation of a wound-healing program. Fibrosis, a type of disorder characterized by excessive scarring, occurs when the normal self-limiting process of wound healing response is disturbed, and causes excessive production and deposition of collagen. As a result, normal organ tissue is replaced with scar tissue, which eventually leads to the functional failure of the organ.

[0289] Fibrosis may be initiated by diverse causes and in various organs. Liver cirrhosis, pulmonary fibrosis, sarcoidosis, keloids and kidney fibrosis are all chronic conditions associated with progressive fibrosis, thereby causing a continuous loss of normal tissue function.

[0290] Acute fibrosis (usually with a sudden and severe onset and of short duration) occurs as a common response to various forms of trauma including accidental injuries (particularly injuries to the spine and central nervous system), infections, surgery, ischemic illness (e.g. cardiac scarring following heart attack), burns, environmental pollutants, alcohol and other types of toxins, acute respiratory distress syndrome, radiation and chemotherapy treatments).

[0291] Fibrosis, a fibrosis related pathology or a pathology related to aberrant crosslinking of cellular proteins may all be treated by the siRNAs disclosed herein. Fibrotic diseases or diseases in which fibrosis is evident (fibrosis related pathology) include both acute and chronic forms of fibrosis of organs, including all etiological variants of the following: pulmonary fibrosis, including interstitial lung disease and fibrotic lung disease, liver fibrosis, cardiac fibrosis including myocardial fibrosis, kidney fibrosis including chronic renal failure, skin fibrosis including scleroderma, keloids and hypertrophic scars; myelofibrosis (bone marrow fibrosis); fibrosis in the brain associated with brain infarction; all types of ocular scarring including proliferative vitreoretinopathy (PVR) and scarring resulting from surgery to treat cataract or glaucoma; inflammatory bowel disease of variable etiology, macular degeneration, Grave's ophthalmopathy, drug induced ergotism, keloid scars, scleroderma, psoriasis, glioblastoma in Li-Fraumeni syndrome, sporadic glioblastoma, myleoid leukemia, acute myelogenous leukemia, myelodysplastic syndrome, myeloproferative syndrome, gynecological cancer, Kaposi's sarcoma, Hansen's disease, fibrosis associated with brain infarction and collagenous colitis.

[0292] In various embodiments, the compounds (nucleic acid molecules) as disclosed herein may be used to treat fibrotic diseases, for example as disclosed herein, as well as many other diseases and conditions apart from fibrotic diseases, for example such as disclosed herein. Other conditions to be treated include fibrotic diseases in other organs—kidney fibrosis for any reason (CKD including ESRD); lung fibrosis (including ILF); myelofibrosis, abnormal scarring (keloids) associated with all possible types of skin injury accidental and jatrogenic (operations); scleroderma; cardiofibrosis, failure of glaucoma filtering operation; intestinal adhesions.

### Ocular Surgery and Fibrotic Complications

[0293] Contracture of scar tissue resulting from eye surgery may often occur. Glaucoma surgery to create new drainage channels often fails due to scarring and contraction of tissues and the generated drainage system may be blocked requiring additional surgical intervention. Current anti-scarring regimens (Mitomycin C or 5FU) are limited due to the complications involved (e.g. blindness) e.g. see Cordeiro M F, et al., Human anti-transforming growth factor-beta2 antibody: a new glaucoma anti-scarring agent Invest Ophthalmol Vis Sci. 1999 September; 40(10):2225-34. There may also be contraction of scar tissue formed after corneal trauma or corneal surgery, for example laser or surgical treatment for myopia or refractive error in which contraction of tissues may lead to inaccurate results. Scar tissue may be formed on/in the vitreous humor or the retina, for example, and may eventually causes blindness in some diabetics, and may be formed after detachment surgery, called proliferative vitreoretinopathy (PVR). PVR is the most common complication following retinal detachment and is associated with a retinal hole or break. PVR refers to the growth of cellular membranes within the vitreous cavity and on the front and back surfaces of the retina containing retinal pigment epithelial (RPE) cells. These membranes, which are essentially scar tissues, exert traction on the retina and may result in recurrences of retinal detachment, even after an initially successful retinal detachment procedure.

[0294] Scar tissue may be formed in the orbit or on eye and eyelid muscles after squint, orbital or eyelid surgery, or thyroid eye disease, and where scarring of the conjunctiva occurs as may happen after glaucoma surgery or in cicatricial disease, inflammatory disease, for example, pemphigoid, or infective disease, for example, trachoma. A further eye problem associated with the contraction of collagen-including tissues is the opacification and contracture of the lens capsule after cataract extraction. Important role for MMPs has been recognized in ocular diseases including wound healing, dry eye, sterile corneal ulceration, recurrent epithelial erosion, corneal neovascularization, pterygium, conjuctivochalasis, glaucoma, PVR, and ocular fibrosis.

### Liver Fibrosis

[0295] Liver fibrosis (LF) is a generally irreversible consequence of hepatic damage of several etiologies. In the Western world, the main etiologic categories are: alcoholic liver disease (30-50%), viral hepatitis (30%), biliary disease (5-10%), primary hemochromatosis (5%), and drug-related and cryptogenic cirrhosis of, unknown etiology, (10-15%). Wilson's disease, α₁-antitrypsin deficiency and other rare diseases also have liver fibrosis as one of the symptoms. Liver cirrhosis, the end stage of liver fibrosis, frequently requires liver transplantation and is among the top ten causes of death in the Western world.

### Kidney Fibrosis and Related Conditions.

### Chronic Renal Failure (CRF)

[0296] Chronic renal failure is a gradual and progressive loss of the ability of the kidneys to excrete wastes, concentrate urine, and conserve electrolytes. CRF is slowly progressive. It most often results from any disease that causes gradual loss of kidney function, and fibrosis is the main pathology that produces CRF.

### Diabetic Nephropathy

[0297] Diabetic nephropathy, hallmarks of which are glomerulosclerosis and tubulointerstitial fibrosis, is the single most prevalent cause of end-stage renal disease in the modern world, and diabetic patients constitute the largest population on dialysis. Such therapy is costly and far from optimal. Transplantation offers a better outcome but suffers from a severe shortage of donors.

### Chronic Kidney Disease

[0298] Chronic kidney disease (CKD) is a worldwide public health problem and is recognized as a common condition that is associated with an increased risk of cardiovascular disease and chronic renal failure (CRF).

[0299] The Kidney Disease Outcomes Quality Initiative (K/DOQI) of the National Kidney Foundation (NKF) defines chronic kidney disease as either kidney damage or a decreased kidney glomerular filtration rate (GFR) for three or more months. Other markers of CKD are also known and used for diagnosis. In general, the destruction of renal mass with irreversible sclerosis and loss of nephrons leads to a progressive decline in GFR. Recently, the K/DOQI published a classification of the stages of CKD, as follows:
[0300] Stage 1: Kidney damage with normal or increased GFR (>90 mL/min/1.73 m2)
[0301] Stage 2: Mild reduction in GFR (60-89 mL/min/1.73 m2)
[0302] Stage 3: Moderate reduction in GFR (30-59 mL/min/1.73 m2)
[0303] Stage 4: Severe reduction in GFR (15-29 mL/min/1.73 m2)
[0304] Stage 5: Kidney failure (GFR<15 mL/min/1.73 m2 or dialysis)

[0305] In stages 1 and 2 CKD, GFR alone does not confirm the diagnosis. Other markers of kidney damage, including abnormalities in the composition of blood or urine or abnormalities in imaging tests, may be relied upon.

### Pathophysiology of CKD

[0306] Approximately 1 million nephrons are present in each kidney, each contributing to the total GFR. Irrespective of the etiology of renal injury, with progressive destruction of nephrons, the kidney is able to maintain GFR by hyperfiltration and compensatory hypertrophy of the remaining healthy nephrons. This nephron adaptability allows for continued normal clearance of plasma solutes so that substances such as urea and creatinine start to show significant increases in plasma levels only after total GFR has decreased to 50%, when the renal reserve has been exhausted. The plasma creatinine value will approximately double with a 50% reduction in GFR. Therefore, a doubling in plasma creatinine from a baseline value of 0.6 mg/dL to 1.2 mg/dL in a patient actually represents a loss of 50% of functioning nephron mass.

[0307] The residual nephron hyperfiltration and hypertrophy, although beneficial for the reasons noted, is thought to represent a major cause of progressive renal dysfunction. This is believed to occur because of increased glomerular capillary pressure, which damages the capillaries and leads initially to focal and segmental glomerulosclerosis and eventually to global glomerulosclerosis. This hypothesis has been based on studies of five-sixths nephrectomized rats, which develop lesions that are identical to those observed in humans with CKD.

[0308] The two most common causes of chronic kidney disease are diabetes and hypertension. Other factors include acute insults from nephrotoxins, including contrasting agents, or decreased perfusion; Proteinuria; Increased renal ammoniagenesis with interstitial injury; Hyperlipidemia; Hyperphosphatemia with calcium phosphate deposition; Decreased levels of nitrous oxide and smoking

[0309] In the United States, the incidence and prevalence of CKD is rising, with poor outcomes and high cost to the health system. Kidney disease is the ninth leading cause of death in the US. The high rate of mortality has led the US Surgeon General's mandate for America's citizenry, Healthy People 2010, to contain a chapter focused on CKD. The objectives of this chapter are to articulate goals and to provide strategies to reduce the incidence, morbidity, mortality, and health costs of chronic kidney disease in the United States.

[0310] The incidence rates of end-stage renal disease (ESRD) have also increased steadily internationally since 1989. The United States has the highest incident rate of ESRD, followed by Japan. Japan has the highest prevalence per million population, followed by the US.

[0311] The mortality rates associated with hemodialysis are striking and indicate that the life expectancy of patients entering into hemodialysis is markedly shortened. At every age, patients with ESRD on dialysis have significantly increased mortality when compared with nondialysis patients and individuals without kidney disease. At age 60 years, a healthy person can expect to live for more than 20 years, whereas the life expectancy of a 60-year-old patient starting hemodialysis is closer to 4 years (Aurora and Verelli, May 21, 2009. Chronic Renal Failure: Treatment & Medication. Emedicine. http://emedicine.medscape.com/article/238798-treatment).

### Pulmonary Fibrosis

[0312] Interstitial pulmonary fibrosis (IPF) is scarring of the lung caused by a variety of inhaled agents including mineral particles, organic dusts, and oxidant gases, or by unknown reasons (idiopathic lung fibrosis). The disease afflicts millions of individuals worldwide, and there are no effective therapeutic approaches. A major reason for the lack of useful treatments is that few of the molecular mechanisms of disease have been defined sufficiently to design appropriate targets for therapy (Lasky J A., Brody A R. (2000), “Interstitial fibrosis and growth factors”, Environ Health Perspect.; 108 Suppl 4:751-62).

### Cardiac Fibrosis

[0313] Heart failure is unique among the major cardiovascular disorders in that it alone is increasing in prevalence while there has been a striking decrease in other conditions. Some of this can be attributed to the aging of the populations of the United States and Europe. The ability to salvage patients with myocardial damage is also a major factor, as these patients may develop progression of left ventricular dysfunction due to deleterious remodelling of the heart.

[0314] The normal myocardium is composed of a variety of cells, cardiac myocytes and noncardiomyocytes, which include endothelial and vascular smooth muscle cells and fibroblasts.

[0315] Structural remodeling of the ventricular wall is a key determinant of clinical outcome in heart disease. Such remodeling involves the production and destruction of extracellular matrix proteins, cell proliferation and migration, and apoptotic and necrotic cell death. Cardiac fibroblasts are crucially involved in these processes, producing growth factors and cytokines that act as autocrine and paracrine factors, as well as extracellular matrix proteins and proteinases. Recent studies have shown that the interactions between cardiac fibroblasts and cardiomyocytes are essential for the progression of cardiac remodeling of which the net effect is deterioration in cardiac function and the onset of heart failure (Manabe I, et al., (2002), “Gene expression in fibroblasts and fibrosis: involvement in cardiac hypertrophy”, Circ Res. 13; 91(12):1103-13).

### Burns and Scars

[0316] A particular problem which may arise, particularly in fibrotic disease, is contraction of tissues, for example contraction of scars. Contraction of tissues including extracellular matrix components, especially of collagen-including tissues, may occur in connection with many different pathological conditions and with surgical or cosmetic procedures. Contracture, for example, of scars, may cause physical problems, which may lead to the need for medical treatment, or it may cause problems of a purely cosmetic nature. Collagen is the major component of scar and other contracted tissue and as such is the most important structural component to consider. Nevertheless, scar and other contracted tissue also includes other structural components, especially other extracellular matrix components, for example, elastin, which may also contribute to contraction of the tissue.

[0317] Contraction of collagen-including tissue, which may also include other extracellular matrix components, frequently occurs in the healing of burns. The burns may be chemical, thermal or radiation burns and may be of the eye, the surface of the skin or the skin and the underlying tissues. It may also be the case that there are burns on internal tissues, for example, caused by radiation treatment. Contraction of burnt tissues is often a problem and may lead to physical and/or cosmetic problems, for example, loss of movement and/or disfigurement.

[0318] Skin grafts may be applied for a variety of reasons and may often undergo contraction after application. As with the healing of burnt tissues the contraction may lead to both physical and cosmetic problems. It is a particularly serious problem where many skin grafts are needed as, for example, in a serious burns case.

[0319] Contraction is also a problem in production of artificial skin. To make a true artificial skin it is necessary to have an epidermis made of epithelial cells (keratinocytes) and a dermis made of collagen populated with fibroblasts. It is important to have both types of cells because they signal and stimulate each other using growth factors. The collagen component of the artificial skin often contracts to less than one tenth of its original area when populated by fibroblasts.

[0320] Cicatricial contraction, contraction due to shrinkage of the fibrous tissue of a scar, is common. In some cases the scar may become a vicious cicatrix, a scar in which the contraction causes serious deformity. A patient's stomach may be effectively separated into two separate chambers in an hour-glass contracture by the contraction of scar tissue formed when a stomach ulcer heals. Obstruction of passages and ducts, cicatricial stenosis, may occur due to the contraction of scar tissue. Contraction of blood vessels may be due to primary obstruction or surgical trauma, for example, after surgery or angioplasty. Stenosis of other hollow visci, for examples, ureters, may also occur. Problems may occur where any form of scarring takes place, whether resulting from accidental wounds or from surgery. Conditions of the skin and tendons which involve contraction of collagen-including tissues include post-trauma conditions resulting from surgery or accidents, for example, hand or foot tendon injuries, post-graft conditions and pathological conditions, such as scleroderma, Dupuytren's contracture and epidermolysis bullosa. Scarring and contraction of tissues in the eye may occur in various conditions, for example, the sequelae of retinal detachment or diabetic eye disease (as mentioned above). Contraction of the sockets found in the skull for the eyeballs and associated structures, including extra-ocular muscles and eyelids, may occur if there is trauma or inflammatory damage. The tissues contract within the sockets causing a variety of problems including double vision and an unsightly appearance.

[0321] Other indications include Vocal cord fibrosis, Intestinal fibrosis and Fibrosis associated with brain infarction.

[0322] For further information on different types of fibrosis see: Molina V, et al., (2002), “Fibrotic diseases”, Harefuah, 141(11): 973-8, 1009; Yu L, et al., (2002), “Therapeutic strategies to halt renal fibrosis”, Curr Opin Pharmacol. 2(2):177-81; Keane W F and Lyle P A. (2003), “Recent advances in management of type 2 diabetes and nephropathy: lessons from the RENAAL study”, Am J Kidney Dis. 41(3 Suppl 2): S22-5; Bohle A, et al., (1989), “The pathogenesis of chronic renal failure”, Pathol Res Pract. 185(4):421-40; Kikkawa R, et al., (1997), “Mechanism of the progression of diabetic nephropathy to renal failure”, Kidney Int Suppl. 62:S39-40; Bataller R, and Brenner D A. (2001), “Hepatic stellate cells as a target for the treatment of liver fibrosis”, Semin Liver Dis. 21(3):437-51; Gross T J and Hunninghake G W, (2001) “Idiopathic pulmonary fibrosis”, N Engl J Med. 345(7):517-25; Frohlich E D. (2001) “Fibrosis and ischemia: the real risks in hypertensive heart disease”, Am J Hypertens; 14(6 Pt 2):194S-199S; Friedman S L. (2003), “Liver fibrosis—from bench to bedside”, J Hepatol. 38 Suppl 1:S38-53; Albanis E, et al., (2003), “Treatment of hepatic fibrosis: almost there”, Curr Gastroenterol Rep. 5(1):48-56; (Weber K T. (2000), “Fibrosis and hypertensive heart disease”, Curr Opin Cardiol. 15(4):264-72).

### Delivery of Nucleic Acid Molecules and Pharmaceutical Formulations

[0323] Nucleic acid molecules may be adapted for use to prevent or treat fibrotic (e.g., liver, kidney, peritoneal, and pulmonary) diseases, traits, conditions and/or disorders, and/or any other trait, disease, disorder or condition that is related to or will respond to the levels of TIMP1 and TIMP2 in a cell or tissue. A nucleic acid molecule may include a delivery vehicle, including liposomes, for administration to a subject, carriers and diluents and their salts, and/or can be present in pharmaceutically acceptable formulations.

[0324] Nucleic acid molecules of the present invention may be delivered to the target tissue by direct application of the naked molecules prepared with a carrier or a diluent.

[0325] The terms “naked nucleic acid” or “naked dsRNA” or “naked siRNA” refers to nucleic acid molecules that are free from any delivery vehicle that acts to assist, promote or facilitate entry into the cell, including viral sequences, viral particles, liposome formulations, lipofectin or precipitating agents and the like. For example, dsRNA in PBS is “naked dsRNA”.

[0326] Nucleic acid molecules disclosed herein may be delivered or administered directly with a carrier or diluent but not any delivery vehicle that acts to assist, promote or facilitate entry to the cell, including viral vectors, viral particles, liposome formulations, lipofectin or precipitating agents and the like.

[0327] Nucleic acid molecules may be delivered or administered to a subject by direct application of the nucleic acid molecules with a carrier or diluent or any other delivery vehicle that acts to assist, promote or facilitate entry into a cell, including viral sequences, viral particular, liposome formulations, lipofectin or precipitating agents and the like. Polypeptides that facilitate introduction of nucleic acid into a desired subject such as those described in US. Application Publication No. 20070155658 (e.g., a melamine derivative such as 2,4,6-Triguanidino Traizine and 2,4,6-Tramidosarcocyl Melamine, a polyarginine polypeptide, and a polypeptide including alternating glutamine and asparagine residues).

[0328] Methods for the delivery of nucleic acid molecules are described in Akhtar et al., Trends Cell Bio., 2: 139 (1992); Delivery Strategies for Antisense Oligonucleotide Therapeutics, ed. Akhtar, (1995), Maurer et al., Mol. Membr. Biol., 16: 129-140 (1999); Hofland and Huang, Handb. Exp. Pharmacol., 137: 165-192 (1999); and Lee et al., ACS Symp. Ser., 752: 184-192 (2000); U.S. Pat. Nos. 6,395,713; 6,235,310; 5,225,182; 5,169,383; 5,167,616; 4,959217; 4,925,678; 4,487,603; and 4,486,194 and Sullivan et al., PCT WO 94/02595; PCT WO 00/03683 and PCT WO 02/08754; and U.S. Patent Application Publication No. 2003077829. These protocols can be utilized for the delivery of virtually any nucleic acid molecule. Nucleic acid molecules can be administered to cells by a variety of methods known to those of skill in the art, including, but not restricted to, encapsulation in liposomes, by iontophoresis, or by incorporation into other vehicles, such as biodegradable polymers, hydrogels, cyclodextrins (see e.g., Gonzalez et al., Bioconjugate Chem., 10: 1068-1074 (1999); Wang et al., International PCT publication Nos. WO 03/47518 and WO 03/46185), poly(lactic-co-glycolic)acid (PLGA) and PLCA microspheres (see for example U.S. Pat. No. 6,447,796 and U.S. Application Publication No. 2002130430), biodegradable nanocapsules, and bioadhesive microspheres, or by proteinaceous vectors (O'Hare and Normand, International PCT Publication No. WO 00/53722). Alternatively, the nucleic acid/vehicle combination is locally delivered by direct injection or by use of an infusion pump. Direct injection of the nucleic acid molecules as disclosed herein, whether subcutaneous, intramuscular, or intradermal, can take place using standard needle and syringe methodologies, or by needle-free technologies such as those described in Conry et al., Clin. Cancer Res., 5: 2330-2337 (1999) and Barry et al., International PCT Publication No. WO 99/31262. The molecules of as described herein can be used as pharmaceutical agents. Pharmaceutical agents may prevent, modulate the occurrence, or treat (alleviate a symptom to some extent, preferably all of the symptoms) of a disease state in a subject.

[0329] Nucleic acid molecules may be complexed with cationic lipids, packaged within liposomes, or otherwise delivered to target cells or tissues. The nucleic acid or nucleic acid complexes can be locally administered to relevant tissues ex vivo, or in vivo through direct dermal application, transdermal application, or injection, with or without their incorporation in biopolymers.

[0330] Delivery systems include surface-modified liposomes containing poly (ethylene glycol) lipids (PEG-modified, or long-circulating liposomes or stealth liposomes). These formulations offer a method for increasing the accumulation of drugs in target tissues. This class of drug carriers resists opsonization and elimination by the mononuclear phagocytic system (MPS or RES), thereby enabling longer blood circulation times and enhanced tissue exposure for the encapsulated drug (Lasic et al. Chem. Rev. 1995, 95, 2601-2627; Ishiwata et al., Chem. Pharm. Bull. 1995, 43, 1005-1011).

[0331] Nucleic acid molecules may be formulated or complexed with polyethylenimine (e.g., linear or branched PEI) and/or polyethylenimine derivatives, including for example polyethyleneimine-polyethyleneglycol-N-acetylgalactosamine (PEI-PEG-GAL) or polyethyleneimine-polyethyleneglycol-tri-N-acetylgalactosamine (PEI-PEG-triGAL) derivatives, grafted PEIs such as galactose PEI, cholesterol PEI, antibody derivatized PEI, and polyethylene glycol PEI (PEG-PEI) derivatives thereof (see for example Ogris et al., 2001, AAPA PharmSci, 3, 1-11; Furgeson et al., 2003, Bioconjugate Chem., 14, 840-847; Kunath et al., 2002, Pharmaceutical Research, 19, 810-817; Choi et al., 2001, Bull. Korean Chem. Soc., 22, 46-52; Bettinger et al., 1999, Bioconjugate Chem., 10, 558-561; Peterson et al., 2002, Bioconjugate Chem., 13, 845-854; Erbacher et al., 1999, Journal of Gene Medicine Preprint, 1, 1-18; Godbey et al., 1999., PNAS USA, 96, 5177-5181; Godbey et al., 1999, Journal of Controlled Release, 60, 149-160; Diebold et al., 1999, Journal of Biological Chemistry, 274, 19087-19094; Thomas and Klibanov, 2002, PNAS USA, 99, 14640-14645; Sagara, U.S. Pat. No. 6,586,524 and United States Patent Application Publication No. 20030077829.

[0332] Nucleic acid molecules may be complexed with membrane disruptive agents such as those described in U.S. Patent Application Publication No. 20010007666. The membrane disruptive agent or agents and the nucleic acid molecule may also be complexed with a cationic lipid or helper lipid molecule, such as those lipids described in U.S. Pat. No. 6,235,310.

[0333] The nucleic acid molecules may be administered via pulmonary delivery, such as by inhalation of an aerosol or spray dried formulation administered by an inhalation device or nebulizer, providing rapid local uptake of the nucleic acid molecules into relevant pulmonary tissues. Solid particulate compositions containing respirable dry particles of micronized nucleic acid compositions can be prepared by grinding dried or lyophilized nucleic acid compositions, and then passing the micronized composition through, for example, a 400 mesh screen to break up or separate out large agglomerates. A solid particulate composition comprising the nucleic acid compositions of contemplated herein can optionally contain a dispersant which serves to facilitate the formation of an aerosol as well as other therapeutic compounds. A suitable dispersant is lactose, which can be blended with the nucleic acid compound in any suitable ratio, such as a 1 to 1 ratio by weight.

[0334] Aerosols of liquid particles may include a nucleic acid molecules disclosed herein and can be produced by any suitable means, such as with a nebulizer (see e.g., U.S. Pat. No. 4,501,729). Nebulizers are commercially available devices which transform solutions or suspensions of an active ingredient into a therapeutic aerosol mist either by means of acceleration of a compressed gas, typically air or oxygen, through a narrow venturi orifice or by means of ultrasonic agitation. Suitable formulations for use in nebulizers include the active ingredient in a liquid carrier in an amount of up to 40% w/w preferably less than 20% w/w of the formulation. The carrier is typically water or a dilute aqueous alcoholic solution, preferably made isotonic with body fluids by the addition of, e.g., sodium chloride or other suitable salts. Optional additives include preservatives if the formulation is not prepared sterile, e.g., methyl hydroxybenzoate, anti-oxidants, flavorings, volatile oils, buffering agents and emulsifiers and other formulation surfactants. The aerosols of solid particles including the active composition and surfactant can likewise be produced with any solid particulate aerosol generator. Aerosol generators for administering solid particulate therapeutics to a subject produce particles which are respirable, as explained above, and generate a volume of aerosol containing a predetermined metered dose of a therapeutic composition at a rate suitable for human administration. One illustrative type of solid particulate aerosol generator is an insufflator. Suitable formulations for administration by insufflation include finely comminuted powders which can be delivered by means of an insufflator. In the insufflator, the powder, e.g., a metered dose thereof effective to carry out the treatments described herein, is contained in capsules or cartridges, typically made of gelatin or plastic, which are either pierced or opened in situ and the powder delivered by air drawn through the device upon inhalation or by means of a manually-operated pump. The powder employed in the insufflator consists either solely of the active ingredient or of a powder blend comprising the active ingredient, a suitable powder diluent, such as lactose, and an optional surfactant. The active ingredient typically includes from 0.1 to 100 w/w of the formulation. A second type of illustrative aerosol generator includes a metered dose inhaler. Metered dose inhalers are pressurized aerosol dispensers, typically containing a suspension or solution formulation of the active ingredient in a liquefied propellant. During use these devices discharge the formulation through a valve adapted to deliver a metered volume to produce a fine particle spray containing the active ingredient. Suitable propellants include certain chlorofluorocarbon compounds, e.g., dichlorodifluoromethane, trichlorofluoromethane, dichlorotetrafluoroethane and mixtures thereof. The formulation can additionally contain one or more co-solvents, for example, ethanol, emulsifiers and other formulation surfactants, such as oleic acid or sorbitan trioleate, anti-oxidants and suitable flavoring agents. Other methods for pulmonary delivery are described in, e.g., US Patent Application No. 20040037780, and U.S. Pat. Nos. 6,592,904; 6,582,728; 6,565,885. PCT Patent Publiction No. WO2008/132723 discloses aerosol delivery of oligonucleotides in general, and of siRNA in particular, to the respiratory system.

[0335] Nucleic acid molecules may be administered to the central nervous system (CNS) or peripheral nervous system (PNS). Experiments have demonstrated the efficient in vivo uptake of nucleic acids by neurons. See e.g., Sommer et al., 1998, Antisense Nuc. Acid Drug Dev., 8, 75; Epa et al., 2000, Antisense Nuc. Acid Drug Dev., 10, 469; Broaddus et al., 1998, J. Neurosurg., 88(4), 734; Karle et al., 1997, Eur. J. Pharmocol., 340(2/3), 153; Bannai et al., 1998, Brain Research, 784(1,2), 304; Rajakumar et al., 1997, Synapse, 26(3), 199; Wu-pong et al., 1999, BioPharm, 12(1), 32; Bannai et al., 1998, Brain Res. Protoc., 3(1), 83; and Simantov et al., 1996, Neuroscience, 74(1), 39. Nucleic acid molecules are therefore amenable to delivery to and uptake by cells in the CNS and/or PNS.

[0336] Delivery of nucleic acid molecules to the CNS is provided by a variety of different strategies. Traditional approaches to CNS delivery that can be used include, but are not limited to, intrathecal and intracerebroventricular administration, implantation of catheters and pumps, direct injection or perfusion at the site of injury or lesion, injection into the brain arterial system, or by chemical or osmotic opening of the blood-brain barrier. Other approaches can include the use of various transport and carrier systems, for example though the use of conjugates and biodegradable polymers. Furthermore, gene therapy approaches, e.g., as described in Kaplitt et al., U.S. Pat. No. 6,180,613 and Davidson, WO 04/013280, can be used to express nucleic acid molecules in the CNS.

[0337] Delivery systems may include, for example, aqueous and nonaqueous gels, creams, multiple emulsions, microemulsions, liposomes, ointments, aqueous and nonaqueous solutions, lotions, aerosols, hydrocarbon bases and powders, and can contain excipients such as solubilizers, permeation enhancers (e.g., fatty acids, fatty acid esters, fatty alcohols and amino acids), and hydrophilic polymers (e.g., polycarbophil and polyvinylpyrolidone). In one embodiment, the pharmaceutically acceptable carrier is a liposome or a transdermal enhancer. Examples of liposomes which can be used include the following: (1) CellFectin, 1:1.5 (M/M) liposome formulation of the cationic lipid N,NI,NII,NIII-tetramethyl-N,NI,NII,NIII-tetrapalmit-y-spermine and dioleoyl phosphatidylethanolamine (DOPE) (GIBCO BRL); (2) Cytofectin GSV, 2:1 (M/M) liposome formulation of a cationic lipid and DOPE (Glen Research); (3) DOTAP(N-[1-(2,3-dioleoyloxy)-N,N,N-tri-methyl-ammoniummethylsulfate) (Boehringer Manheim); and (4) Lipofectamine, 3:1 (M/M) liposome formulation of the polycationic lipid DOSPA, the neutral lipid DOPE (GIBCO BRL) and Di-Alkylated Amino Acid (DiLA2).

[0338] Delivery systems may include patches, tablets, suppositories, pessaries, gels and creams, and can contain excipients such as solubilizers and enhancers (e.g., propylene glycol, bile salts and amino acids), and other vehicles (e.g., polyethylene glycol, fatty acid esters and derivatives, and hydrophilic polymers such as hydroxypropylmethylcellulose and hyaluronic acid).

[0339] Nucleic acid molecules may be formulated or complexed with polyethylenimine (e.g., linear or branched PEI) and/or polyethylenimine derivatives, including for example grafted PEIs such as galactose PEI, cholesterol PEI, antibody derivatized PEI, and polyethylene glycol PEI (PEG-PEI) derivatives thereof (see for example Ogris et al., 2001, AAPA PharmSci, 3, 1-11; Furgeson et al., 2003, Bioconjugate Chem., 14, 840-847; Kunath et al., 2002, Pharmaceutical Research, 19, 810-817; Choi et al., 2001, Bull. Korean Chem. Soc., 22, 46-52; Bettinger et al., 1999, Bioconjugate Chem., 10, 558-561; Peterson et al., 2002, Bioconjugate Chem., 13, 845-854; Erbacher et al., 1999, Journal of Gene Medicine Preprint, 1, 1-18; Godbey et al., 1999., PNAS USA, 96, 5177-5181; Godbey et al., 1999, Journal of Controlled Release, 60, 149-160; Diebold et al., 1999, Journal of Biological Chemistry, 274, 19087-19094; Thomas and Klibanov, 2002, PNAS USA, 99, 14640-14645; and Sagara, U.S. Pat. No. 6,586,524.

[0340] Nucleic acid molecules may include a bioconjugate, for example a nucleic acid conjugate as described in Vargeese et al., U.S. Ser. No. 10/427,160; U.S. Pat. No. 6,528,631; U.S. Pat. No. 6,335,434; U.S. Pat. No. 6,235,886; U.S. Pat. No. 6,153,737; U.S. Pat. No. 5,214,136; U.S. Pat. No. 5,138,045.

[0341] Compositions, methods and kits disclosed herein may include an expression vector that includes a nucleic acid sequence encoding at least one nucleic acid molecule as provided herein in a manner that allows expression of the nucleic acid molecule. Methods of introducing nucleic acid molecules or one or more vectors capable of expressing the strands of dsRNA into the environment of the cell will depend on the type of cell and the make up of its environment. The nucleic acid molecule or the vector construct may be directly introduced into the cell (i.e., intracellularly); or introduced extracellularly into a cavity, interstitial space, into the circulation of an organism, introduced orally, or may be introduced by bathing an organism or a cell in a solution containing dsRNA. The cell is preferably a mammalian cell; more preferably a human cell. The nucleic acid molecule of the expression vector can include a sense region and an antisense region. The antisense region can include a sequence complementary to a RNA or DNA sequence encoding TIMP1 and TIMP2 and the sense region can include a sequence complementary to the antisense region. The nucleic acid molecule can include two distinct strands having complementary sense and antisense regions. The nucleic acid molecule can include a single strand having complementary sense and antisense regions.

[0342] Nucleic acid molecules that interact with target RNA molecules and down-regulate gene encoding target RNA molecules (e.g., target RNA molecules referred to by Genbank Accession numbers herein) may be expressed from transcription units inserted into DNA or RNA vectors. Recombinant vectors can be DNA plasmids or viral vectors. Nucleic acid molecule expressing viral vectors can be constructed based on, but not limited to, adeno-associated virus, retrovirus, adenovirus, or alphavirus. The recombinant vectors capable of expressing the nucleic acid molecules can be delivered as described herein, and persist in target cells. Alternatively, viral vectors can be used that provide for transient expression of nucleic acid molecules. Such vectors can be repeatedly administered as necessary. Once expressed, the nucleic acid molecules bind and down-regulate gene function or expression via RNA interference (RNAi). Delivery of nucleic acid molecule expressing vectors can be systemic, such as by intravenous or intramuscular administration, by administration to target cells ex-planted from a subject followed by reintroduction into the subject, or by any other means that would allow for introduction into the desired target cell.

[0343] Expression vectors may include a nucleic acid sequence encoding at least one nucleic acid molecule disclosed herein, in a manner which allows expression of the nucleic acid molecule. For example, the vector may contain sequence(s) encoding both strands of a nucleic acid molecule that include a duplex. The vector can also contain sequence(s) encoding a single nucleic acid molecule that is self-complementary and thus forms a nucleic acid molecule. Non-limiting examples of such expression vectors are described in Paul et al., 2002, Nature Biotechnology, 19, 505; Miyagishi and Taira, 2002, Nature Biotechnology, 19, 497; Lee et al., 2002, Nature Biotechnology, 19, 500; and Novina et al., 2002, Nature Medicine, advance online publication doi:10.1038/nm725. Expression vectors may also be included in a mammalian (e.g., human) cell.

[0344] An expression vector may include a nucleic acid sequence encoding two or more nucleic acid molecules, which can be the same or different. Expression vectors may include a sequence for a nucleic acid molecule complementary to a nucleic acid molecule referred to by a Genbank Accession number NM_{—}003254 (TIMP1) or NM_{—}003255 (TIMP2).

[0345] An expression vector may encode one or both strands of a nucleic acid duplex, or a single self-complementary strand that self hybridizes into a nucleic acid duplex. The nucleic acid sequences encoding nucleic acid molecules can be operably linked in a manner that allows expression of the nucleic acid molecule (see for example Paul et al., 2002, Nature Biotechnology, 19, 505; Miyagishi and Taira, 2002, Nature Biotechnology, 19, 497; Lee et al., 2002, Nature Biotechnology, 19, 500; and Novina et al., 2002, Nature Medicine, advance online publication doi:10.1038/nm725).

[0346] An expression vector may include one or more of the following: a) a transcription initiation region (e.g., eukaryotic pol I, II or III initiation region); b) a transcription termination region (e.g., eukaryotic pol I, II or III termination region); c) an intron and d) a nucleic acid sequence encoding at least one of the nucleic acid molecules, wherein said sequence is operably linked to the initiation region and the termination region in a manner that allows expression and/or delivery of the nucleic acid molecule. The vector can optionally include an open reading frame (ORF) for a protein operably linked on the 5′ side or the 3′-side of the sequence encoding the nucleic acid molecule; and/or an intron (intervening sequences).

[0347] Transcription of the nucleic acid molecule sequences can be driven from a promoter for eukaryotic RNA polymerase I (pol I), RNA polymerase II (pol II), or RNA polymerase III (pol III). Transcripts from pol II or pol III promoters are expressed at high levels in all cells; the levels of a given pol II promoter in a given cell type depends on the nature of the gene regulatory sequences (enhancers, silencers, etc.) present nearby. Prokaryotic RNA polymerase promoters are also used, providing that the prokaryotic RNA polymerase enzyme is expressed in the appropriate cells (Elroy-Stein and Moss, 1990, Proc. Natl. Acad. Sci. USA, 87, 6743-7; Gao and Huang 1993, Nucleic Acids Res., 21, 2867-72; Lieber et al., 1993, Methods Enzymol., 217, 47-66; Zhou et al., 1990, Mol. Cell. Biol., 10, 4529-37). Several investigators have demonstrated that nucleic acid molecules expressed from such promoters can function in mammalian cells (e.g. Kashani-Sabet et al., 1992, Antisense Res. Dev., 2, 3-15; Ojwang et al., 1992, Proc. Natl. Acad. Sci. USA, 89, 10802-6; Chen et al., 1992, Nucleic Acids Res., 20, 4581-9; Yu et al., 1993, Proc. Natl. Acad. Sci. USA, 90, 6340-4; L'Huillier et al., 1992, EMBO J., 11, 4411-8; Lisziewicz et al., 1993, Proc. Natl. Acad. Sci. U.S.A, 90, 8000-4; Thompson et al., 1995, Nucleic Acids Res., 23, 2259; Sullenger & Cech, 1993, Science, 262, 1566). More specifically, transcription units such as the ones derived from genes encoding U6 small nuclear (snRNA), transfer RNA (tRNA) and adenovirus VA RNA are useful in generating high concentrations of desired RNA molecules such as siNA in cells (Thompson et al., supra; Couture and Stinchcomb, 1996, supra; Noonberg et al., 1994, Nucleic Acid Res., 22, 2830; Noonberg et al., U.S. Pat. No. 5,624,803; Good et al., 1997, Gene Ther., 4, 45; Beigelman et al., International PCT Publication No. WO 96/18736. The above nucleic acid transcription units can be incorporated into a variety of vectors for introduction into mammalian cells, including but not restricted to, plasmid DNA vectors, viral DNA vectors (such as adenovirus or adeno-associated virus vectors), or viral RNA vectors (such as retroviral or alphavirus vectors) (see Couture and Stinchcomb, 1996 supra).

[0348] Nucleic acid molecule may be expressed within cells from eukaryotic promoters (e.g., Izant and Weintraub, 1985, Science, 229, 345; McGarry and Lindquist, 1986, Proc. Natl. Acad. Sci., USA 83, 399; Scanlon et al., 1991, Proc. Natl. Acad. Sci. USA, 88, 10591-5; Kashani-Sabet et al., 1992, Antisense Res. Dev., 2, 3-15; Dropulic et al., 1992, J. Virol., 66, 1432-41; Weerasinghe et al., 1991, J. Virol., 65, 5531-4; Ojwang et al., 1992, Proc. Natl. Acad. Sci. USA, 89, 10802-6; Chen et al., 1992, Nucleic Acids Res., 20, 4581-9; Sarver et al., 1990 Science, 247, 1222-1225; Thompson et al., 1995, Nucleic Acids Res., 23, 2259; Good et al., 1997, Gene Therapy, 4, 45. Those skilled in the art realize that any nucleic acid can be expressed in eukaryotic cells from the appropriate DNA/RNA vector. The activity of such nucleic acids can be augmented by their release from the primary transcript by a enzymatic nucleic acid (Draper et al., PCT WO 93/23569, and Sullivan et al., PCT WO 94/02595; Ohkawa et al., 1992, Nucleic Acids Symp. Ser., 27, 15-6; Taira et al., 1991, Nucleic Acids Res., 19, 5125-30; Ventura et al., 1993, Nucleic Acids Res., 21, 3249-55; Chowrira et al., 1994, J. Biol. Chem., 269, 25856.

[0349] A viral construct packaged into a viral particle would accomplish both efficient introduction of an expression construct into the cell and transcription of dsRNA construct encoded by the expression construct.

[0350] Methods for oral introduction include direct mixing of RNA with food of the organism, as well as engineered approaches in which a species that is used as food is engineered to express an RNA, then fed to the organism to be affected. Physical methods may be employed to introduce a nucleic acid molecule solution into the cell. Physical methods of introducing nucleic acids include injection of a solution containing the nucleic acid molecule, bombardment by particles covered by the nucleic acid molecule, soaking the cell or organism in a solution of the RNA, or electroporation of cell membranes in the presence of the nucleic acid molecule.

[0351] Other methods known in the art for introducing nucleic acids to cells may be used, such as lipid-mediated carrier transport, chemical mediated transport, such as calcium phosphate, and the like. Thus the nucleic acid molecules may be introduced along with components that perform one or more of the following activities: enhance RNA uptake by the cell, promote annealing of the duplex strands, stabilize the annealed strands, or other-wise increase inhibition of the target gene.

[0352] The nucleic acid molecules or the vector construct can be introduced into the cell using suitable formulations. One formulation comprises a lipid formulation such as in Lipofectamine™ 2000 (Invitrogen, CA, USA. Lipid formulations can also be administered to animals such as by intravenous, intramuscular, or intraperitoneal injection, or orally or by inhalation or other methods as are known in the art. When the formulation is suitable for administration into animals such as mammals and more specifically humans, the formulation is also pharmaceutically acceptable. Pharmaceutically acceptable formulations for administering oligonucleotides are known and can be used. In some instances, it may be preferable to formulate dsRNA in a buffer or saline solution and directly inject the formulated dsRNA into cells, as in studies with oocytes. The direct injection of dsRNA duplexes may also be done. For suitable methods of introducing dsRNA see U.S. published patent application No. 2004/0203145, 20070265220 which are incorporated herein by reference.

[0353] Polymeric nanocapsules or microcapsules facilitate transport and release of the encapsulated or bound dsRNA into the cell. They include polymeric and monomeric materials, especially including polybutylcyanoacrylate. A summary of materials and fabrication methods has been published (see Kreuter, 1991). The polymeric materials which are formed from monomeric and/or oligomeric precursors in the polymerization/nanoparticle generation step, are per se known from the prior art, as are the molecular weights and molecular weight distribution of the polymeric material which a person skilled in the field of manufacturing nanoparticles may suitably select in accordance with the usual skill.

[0354] Nucleic acid moles may be formulated as a microemulsion. A microemulsion is a system of water, oil and amphiphile which is a single optically isotropic and thermodynamically stable liquid solution. Typically microemulsions are prepared by first dispersing an oil in an aqueous surfactant solution and then adding a sufficient amount of a 4th component, generally an intermediate chain-length alcohol to form a transparent system.

[0355] Surfactants that may be used in the preparation of microemulsions include, but are not limited to, ionic surfactants, non-ionic surfactants, Brij 96, polyoxyethylene oleyl ethers, polyglycerol fatty acid esters, tetraglycerol monolaurate (ML310), tetraglycerol monooleate (MO310), hexaglycerol monooleate (PO310), hexaglycerol pentaoleate (PO500), decaglycerol monocaprate (MCA750), decaglycerol monooleate (MO750), decaglycerol sequioleate (SO750), decaglycerol decaoleate (DA0750), alone or in combination with cosurfactants. The cosurfactant, usually a short-chain alcohol such as ethanol, 1-propanol, and 1-butanol, serves to increase the interfacial fluidity by penetrating into the surfactant film and consequently creating a disordered film because of the void space generated among surfactant molecules.

### Water Soluble Crosslinked Polymers

[0356] Delivery formulations can include water soluble degradable crosslinked polymers that include one or more degradable crosslinking lipid moiety, one or more PEI moiety, and/or one or more mPEG (methyl ether derivative of PEG (methoxypoly (ethylene glycol)).

[0357] Degradable lipid moieties preferably include compounds having the following structural motif:

[chemical structure]

[0358] In the above formula, ester linkages are biodegradable groups, R represents a relatively hydrophobic “lipo” group, and the structural motif shown occurs m times where m is in the range of about 1 to about 30. For example, in certain embodiments R is selected from the group consisting of C₂-C₅₀ alkyl, C₂-C₅₀ heteroalkyl, C₂-C₅₀ alkenyl, C₂-C₅₀ heteroalkenyl, C₅-C₅₀ aryl; C₂-C₅₀ heteroaryl; C₂-C₅₀ alkynyl, C₂-C₅₀ heteroalkynyl, C₂-C₅₀ carboxyalkenyl, and C₂-C₅₀ carboxyheteroalkenyl. In preferred embodiments, R is a saturated or unsaturated alkyl having 4 to 30 carbons, more preferably 8 to 24 carbons or a sterol, preferably a cholesteryl moiety. In preferred embodiments, R is oleic, lauric, myristic, palmitic margaric, stearic, arachidic, behenic, or lignoceric. In a most preferred embodiment, R is oleic.

[0359] The N in formula (B) may have an electron pair or a bond to a hydrogen atom. When N has an electron pair, the recurring unit may be cationic at low pH.

[0360] The degradable crosslinking lipid moiety may be reacted with a polyethyleneimine (PEI) as shown in Scheme A below:

[chemical structure]

[0361] In formula (A), R has the same meanings as described above. The PEI may contain recurring units of formula (B) in which x is an integer in the range of about 1 to about 100 and y is an integer in the range of about 1 to about 100.

[chemical structure]

[0362] The reaction illustrated in Scheme A may be carried out by intermixing the PEI and the diacrylate (I) in a mutual solvent such as ethanol, methanol or dichloromethane with stirring, preferably at room temperature for several hours, then evaporating the solvent to recover the resulting polymer. While not wishing to be bound to any particular theory, it is believed that the reaction between the PEI and diacrylate (I) involves a Michael reaction between one or more amines of the PEI with double bond(s) of the diacrylate (see J. March, Advanced Organic Chemistry 3rd Ed., pp. 711-712 (1985)). The diacrylate shown in Scheme A may be prepared in the manner as described in U.S. application Ser. No. 11/216,986 (US Publication No. 2006/0258751).

[0363] The molecular weight of the PEI is preferably in the range of about 200 to 25,000 Daltons more preferably 400 to 5,000 Daltons, yet more preferably 600 to 2000 Daltons. PEI may be either branched or linear.

[0364] The molar ratio of PEI to diacrylate is preferably in the range of about 1:2 to about 1:20. The weight average molecular weight of the cationic lipopolymer may be in the range of about 500 Daltons to about 1,000,000 Daltons preferably in the range of about 2,000 Daltons to about 200,000 Daltons. Molecular weights may be determined by size exclusion chromatography using PEG standards or by agarose gel electrophoresis.

[0365] The cationic lipopolymer is preferably degradable, more preferably biodegradable, e.g., degradable by a mechanism selected from the group consisting of hydrolysis, enzyme cleavage, reduction, photo-cleavage, and sonication. While not wishing to be bound to any particular theory, but it is believed that degradation of the cationic lipopolymer of formula (II) within the cell proceeds by enzymatic cleavage and/or hydrolysis of the ester linkages.

[0366] Synthesis may be carried out by reacting the degradable lipid moiety with the PEI moiety as described above. Then the mPEG (methyl ether derivative of PEG (methoxypoly (ethylene glycol)), is added to form the degradable crosslinked polymer. In preferred embodiments, the reaction is carried out at room temperature. The reaction products may be isolated by any means known in the art including chromatographic techniques. In a preferred embodiment, the reaction product may be removed by precipitation followed by centrifugation.

### Dosages

[0367] The useful dosage to be administered and the particular mode of administration will vary depending upon such factors as the cell type, or for in vivo use, the age, weight and the particular animal and region thereof to be treated, the particular nucleic acid and delivery method used, the therapeutic or diagnostic use contemplated, and the form of the formulation, for example, suspension, emulsion, micelle or liposome, as will be readily apparent to those skilled in the art. Typically, dosage is administered at lower levels and increased until the desired effect is achieved.

[0368] When lipids are used to deliver the nucleic acid, the amount of lipid compound that is administered can vary and generally depends upon the amount of nucleic acid being administered. For example, the weight ratio of lipid compound to nucleic acid is preferably from about 1:1 to about 30:1, with a weight ratio of about 5:1 to about 10:1 being more preferred.

[0369] A suitable dosage unit of nucleic acid molecules may be in the range of 0.001 to 0.25 milligrams per kilogram body weight of the recipient per day, or in the range of 0.01 to 20 micrograms per kilogram body weight per day, or in the range of 0.01 to 10 micrograms per kilogram body weight per day, or in the range of 0.10 to 5 micrograms per kilogram body weight per day, or in the range of 0.1 to 2.5 micrograms per kilogram body weight per day.

[0370] Suitable amounts of nucleic acid molecules may be introduced and these amounts can be empirically determined using standard methods. Effective concentrations of individual nucleic acid molecule species in the environment of a cell may be about 1 femtomolar, about 50 femtomolar, 100 femtomolar, 1 picomolar, 1.5 picomolar, 2.5 picomolar, 5 picomolar, 10 picomolar, 25 picomolar, 50 picomolar, 100 picomolar, 500 picomolar, 1 nanomolar, 2.5 nanomolar, 5 nanomolar, 10 nanomolar, 25 nanomolar, 50 nanomolar, 100 nanomolar, 500 nanomolar, 1 micromolar, 2.5 micromolar, 5 micromolar, 10 micromolar, 100 micromolar or more.

[0371] Dosage may be from 0.01 μg to 1 g per kg of body weight (e.g., 0.1 μg, 0.25 μg, 0.5 μg, 0.75 μg, 1 μg, 2.5 μg, 5 μg, 10 μg, 25 μg, 50 μg, 100 μg, 250 μg, 500 μg, 1 mg, 2.5 mg, 5 mg, 10 mg, 25 mg, 50 mg, 100 mg, 250 mg, or 500 mg per kg).

[0372] Dosage levels of the order of from about 0.1 mg to about 140 mg per kilogram of body weight per day are useful in the treatment of the above-indicated conditions (about 0.5 mg to about 7 g per subject per day). The amount of active ingredient that can be combined with the carrier materials to produce a single dosage form varies depending upon the host treated and the particular mode of administration. Dosage unit forms generally contain between from about 1 mg to about 500 mg of an active ingredient.

[0373] It is understood that the specific dose level for any particular subject depends upon a variety of factors including the activity of the specific compound employed, the age, body weight, general health, sex, diet, time of administration, route of administration, and rate of excretion, drug combination and the severity of the particular disease undergoing therapy.

[0374] Pharmaceutical compositions that include the nucleic acid molecule disclosed herein may be administered once daily, qid, tid, bid, QD, or at any interval and for any duration that is medically appropriate. However, the therapeutic agent may also be dosed in dosage units containing two, three, four, five, six or more sub-doses administered at appropriate intervals throughout the day. In that case, the nucleic acid molecules contained in each sub-dose may be correspondingly smaller in order to achieve the total daily dosage unit. The dosage unit can also be compounded for a single dose over several days, e.g., using a conventional sustained release formulation which provides sustained and consistent release of the dsRNA over a several day period. Sustained release formulations are well known in the art. The dosage unit may contain a corresponding multiple of the daily dose. The composition can be compounded in such a way that the sum of the multiple units of a nucleic acid together contain a sufficient dose.

### Pharmaceutical Compositions, Kits, and Containers

[0375] Also provided are compositions, kits, containers and formulations that include a nucleic acid molecule (e.g., an siNA molecule) as provided herein for reducing expression of TIMP1 and TIMP2 for administering or distributing the nucleic acid molecule to a patient. A kit may include at least one container and at least one label. Suitable containers include, for example, bottles, vials, syringes, and test tubes. The containers can be formed from a variety of materials such as glass, metal or plastic. The container can hold amino acid sequence(s), small molecule(s), nucleic acid sequence(s), cell population(s) and/or antibody(s). In one embodiment, the container holds a polynucleotide for use in examining the mRNA expression profile of a cell, together with reagents used for this purpose. In another embodiment a container includes an antibody, binding fragment thereof or specific binding protein for use in evaluating TIMP1 and TIMP2 protein expression cells and tissues, or for relevant laboratory, prognostic, diagnostic, prophylactic and therapeutic purposes; indications and/or directions for such uses can be included on or with such container, as can reagents and other compositions or tools used for these purposes. Kits may further include associated indications and/or directions; reagents and other compositions or tools used for such purpose can also be included.

[0376] The container can alternatively hold a composition that is effective for treating, diagnosis, prognosing or prophylaxing a condition and can have a sterile access port (for example the container can be an intravenous solution bag or a vial having a stopper pierceable by a hypodermic injection needle). The active agents in the composition can be a nucleic acid molecule capable of specifically binding TIMP1 and TIMP2 and/or modulating the function of TIMP1 and TIMP2.

[0377] A kit may further include a second container that includes a pharmaceutically-acceptable buffer, such as phosphate-buffered saline, Ringer's solution and/or dextrose solution. It can further include other materials desirable from a commercial and user standpoint, including other buffers, diluents, filters, stirrers, needles, syringes, and/or package inserts with indications and/or instructions for use.

[0378] The units dosage ampoules or multidose containers, in which the nucleic acid molecules are packaged prior to use, may include an hermetically sealed container enclosing an amount of polynucleotide or solution containing a polynucleotide suitable for a pharmaceutically effective dose thereof, or multiples of an effective dose. The polynucleotide is packaged as a sterile formulation, and the hermetically sealed container is designed to preserve sterility of the formulation until use.

[0379] The container in which the polynucleotide including a sequence encoding a cellular immune response element or fragment thereof may include a package that is labeled, and the label may bear a notice in the form prescribed by a governmental agency, for example the Food and Drug Administration, which notice is reflective of approval by the agency under Federal law, of the manufacture, use, or sale of the polynucleotide material therein for human administration.

[0380] Federal law requires that the use of pharmaceutical compositions in the therapy of humans be approved by an agency of the Federal government. In the United States, enforcement is the responsibility of the Food and Drug Administration, which issues appropriate regulations for securing such approval, detailed in 21 U.S.C. §301-392. Regulation for biologic material, including products made from the tissues of animals is provided under 42 U.S.C. §262. Similar approval is required by most foreign countries. Regulations vary from country to country, but individual procedures are well known to those in the art and the compositions and methods provided herein preferably comply accordingly.

[0381] The dosage to be administered depends to a large extent on the condition and size of the subject being treated as well as the frequency of treatment and the route of administration. Regimens for continuing therapy, including dose and frequency may be guided by the initial response and clinical judgment. The parenteral route of injection into the interstitial space of tissues is preferred, although other parenteral routes, such as inhalation of an aerosol formulation, may be required in specific administration, as for example to the mucous membranes of the nose, throat, bronchial tissues or lungs.

[0382] As such, provided herein is a pharmaceutical product which may include a polynucleotide including a sequence encoding a cellular immune response element or fragment thereof in solution in a pharmaceutically acceptable injectable carrier and suitable for introduction interstitially into a tissue to cause cells of the tissue to express a cellular immune response element or fragment thereof, a container enclosing the solution, and a notice associated with the container in form prescribed by a governmental agency regulating the manufacture, use, or sale of pharmaceuticals, which notice is reflective of approval by the agency of manufacture, use, or sale of the solution of polynucleotide for human administration.

### Indications

[0383] The nucleic acid molecules disclosed herein can be used to treat diseases, conditions or disorders associated with TIMP1 and TIMP2, such as liver fibrosis, cirrhosis, pulmonary fibrosis, kidney fibrosis, peritoneal fibrosis, chronic hepatic damage, and fibrillogenesis and any other disease or conditions that are related to or will respond to the levels of TIMP1 and TIMP2 in a cell or tissue. As such, compositions, kits and methods disclosed herein may include packaging a nucleic acid molecule disclosed herein that includes a label or package insert. The label may include indications for use of the nucleic acid molecules such as use for treatment or prevention of liver fibrosis, peritoneal fibrosis, kidney fibrosis and pulmonary fibrosis, and any other disease or conditions that are related to or will respond to the levels of TIMP1 and TIMP2 in a cell or tissue. A label may include an indication for use in reducing expression of TIMP1 and TIMP2. A “package insert” is used to refer to instructions customarily included in commercial packages of therapeutic products, that contain information about the indications, usage, dosage, administration, contraindications, other therapeutic products to be combined with the packaged product, and/or warnings concerning the use of such therapeutic products, etc.

[0384] Those skilled in the art will recognize that two or more siTIMP1 and or siTIMP2 may be combined or that other anti-fibrosis treatments, drugs and therapies known in the art can be readily combined with the nucleic acid molecules herein (e.g. siNA molecules) and are hence contemplated herein.

[0385] The methods and compositions provided herein will now be described in greater detail by reference to the following non-limiting examples.

### EXAMPLES

### Example 1

### siRNA Sequences

[0386] siRNA sequences for TIMP-1, TIMP-2, positive control and negative control are listed in Tabls C and D. 100 μM siRNA stock solution was prepared by dissolving in nucrease free water (Ambion). In the “Sequence” columns in Tables C and D, lower case letters represent unmodified ribonucleotides, “T” represents deoxyribothymidine.

TABLE C

| | | | | | | |
|---|---|---|---|---|---|---|
| | | | | SEQ ID | | |
| Target | Name | Orientation | Sequence | NO: | Species | nucleotides |

| | | | | | | |
|---|---|---|---|---|---|---|
| TIMP1 | TIMP1-A | S (5′->3′) | ccaccuuauaccagcguuaTT | 5 | Human, | [355-373] |
| | | AS (3′->5′) | TTgguggaauauggucgcaau | 6 | mouse, rat, | ORF |
| | | | | | rhesus | |
| TIMP1 | TIMP1-B | S (5′->3′) | cacuguuggcugugaggaaTT | 7 | Human | [620-638] |
| | | AS (3′->5) | TTgugacaaccgacacuccuu | 8 | rhesus | ORF |
| TIMP1 | TIMP1-C | S (5′->3′) | gcacaguguuucccuguuuTT | 9 | Human mouse | [640-658] |
| | | AS (3′->5′) | TTcgugucacaaagggacaaa | 10 | rat rhesus | ORF |

TABLE D

| | | | | SEQ ID | | |
|---|---|---|---|---|---|---|
| Target | Name | Orientation | Sequence | NO | Species | nucleotides |
| TIMP2 | TIMP2-A | S (5′->3′) | ugcagauguagugaucaggTT | 11 | human | [421-439] |
| | | AS (3′->5′) | TTacgucuacaucacuagucc | 12 | | ORF |
| TIMP2 | TIMP2-B | S (5′->3′) | gaggauccaguaugagaucTT | 13 | human | [502-520] |
| | | AS (3′->5′) | TTcuccuaggucauacucuag | 14 | rhesus | ORF |
| | | | | | rabbit | |
| TIMP2 | TIMP2-C | S (5′->3′) | gcagauaaagauguucaaaTT | 15 | human | [523-541] |
| | | AS (3′->5′) | TTcgucuauuucuacaaguuu | 16 | mouse rat | ORF |
| | | | | | cow dog | |
| | | | | | pig | |
| TIMP2 | TIMP2-D | S (5′->3′) | ggaauaucucauugcaggaTT | 17 | human | [625-643] |
| | | AS (3′->5′) | TTccuuauagaguaacguccu | 18 | | ORF |
| TIMP2 | TIMP2-E | S (5′->3′) | uaucucauugcaggaaaggTT | 19 | human | [629-647] |
| | | AS (3′->5′) | TTauagaguaacguccuuucc | 20 | | ORF |

### Example 2

### siRNA Delivery

[0387] HT-1080 cell (Japanese Collection of Research Bioresources) was maintained incubated in DMEM (Sigma, Cat#D6546) with 10% fetal bovine serum (FBS; Hyclone, Cat.#SH30070.03) and 1% volume/volume L-Glutamine-penicillin-streptomycin solution (Sigma, Cat.#G1146) and 1% volume/volume L-Glutamine solution (Sigma, Cat.#G7513). Before delivering siRNA, cells were seeded in 6-well plate (Nunc. #140675) at the density of 5×10³ cells per well and incubated at 37° C. with 7.5% CO₂ for 2 days. siRNAs for TIMP1 were transfected to the cells with VA-coupled liposome (VA-liposome) as described by Sato et al. (Sato Y. et al. Nature Biotechnology 2008. Vol. 26, p431) and siRNAs for TIMP2 were delivered with VA-conjugated cationic polymer (VA-polymer), synthesized in-house at the ratio of 5:1 (VA-polymer:siRNA, weight per weight). The final concentration of siRNA was 50 nM. 2-hours after siRNA delivery, cell culture medium was replaced to fresh DMEM with 10% FBS and incubated for 2 overnight at 37° C. with 7.5% CO₂.

### Example 3

### Gene Knocking Down Assessment of siRNA by RT-PCR

[0388] After transfection as described in Example 2, total RNA was isolated with QIAshreader QIAGEN, 79654) and RNeasy Mini Kit (QIAGEN, 74104) by following manufacturer's protocol. 1 μg of the isolated total RNA was used for cDNA preparation with Hicapacity RNA-to-cDNA Master Mix (Applied Biosystems, 4390779) as indicated by manufacturer's protocol. Then, 0.05 μg of cDNA was employed for polymerase chain reaction (PCR) with ExTaq (TaKaRa, RR001B) polymerase by following supplied manual. PCR primers for detection of each gene are listed in excel file. PCR condition was as follows: 94° C. 4 min, then 4° C. 30 sec, 63° C. 30 sec, 72° C. 1 min for 23 cycles, 72° C. 5 min before termination. 15 μl of PCR products for TIMP-1 or TIMP-2 gene and 5 μl for GAPDH gene were identified by agarose gel electrophoresis.

[0389] FIG. 2 indicates knock down efficacy of siRNAs for TIMP1 as measured by qPCR. The amount of PCR product from cells transfected with TIMP-1 siRNA, e.g. TIMP1-A (SEQ ID NOS:5 and 6), TIMP1-B (SEQ ID NOS:7 and 8) or TIMP1-C (SEQ ID NOS:9 and 10), was less than that from untreated cells, therefore, those siRNA for TIMP1 gene are capable to knock down the target gene.

[0390] FIG. 3 represents knock down efficacy of siRNAs for TIMP2 as measured by qPCR: TIMP2-A (SEQ ID NOS:11 and 12), TIMP2-B (SEQ ID NOS:13 and 14), TIMP2-C (SEQ ID NOS:15 and 16), TIMP2-D (SEQ ID NOS:17 and 18) and TIMP2-E (SEQ ID NOS:19 and 20). TIMP2 siRNA showed target gene knock down and level of gene silencing was dependent on the sequence.

### Example 4

### Treatment of Liver Cirrhosis in Rats with siTIMP1 and siTIMP2

[0391] Liver cirrhosis animal model: Liver cirrhosis was induced in rats using the method described by Sato et al., (Sato Y. et al. Nat Biotech 2008. 26:431). Briefly, liver cirrhosis was induced in 4 week-old male SD rats by injecting them dimethylnitrosoamine (DMN) (Wako Chemicals, Japan) as follows: 0.5% DMN in phosphate-buffered saline (PBS) was administered to rats intraperitoneally at a dose of 2 ml/kg per body weight for 3 consecutive days per week. Specifically, DMN solution was injected on days 0 (start of the experiment), 2, 4, 7, 9, 11, 14, 16, 18, 21, 23, 25, 28, 30, 32, 34 and 36.

[0392] siRNA Sequence for TIMP1 (“siTIMP1-A”)

| | | |
|---|---|---|
| S (5′->3′) | ccaccuuauaccagcguuaTT | (SEQ ID NO: 5) |
| AS (3′->5′) | TTgguggaauauggucgcaau | (SEQ ID NO: 6) |

[0393] siRNA Sequence for TIMP2 (“siTIMP2-C”)

| | | |
|---|---|---|
| S (5′->3′) | gcagauaaagauguucaaaTT | (SEQ ID NO: 15) |
| AS (3′->5′) | TTcgucuauuucuacaaguuu | (SEQ ID NO: 16) |

[0394] A 10 μg/μl siRNA stock solution was prepared by dissolving siRNA duplexes (siTIMP1 or siTIMP2) in nuclease free water (Ambion). For treatment of rats, siRNA was formulated with vitamin A-coupled liposome as described by Sato et al (Sato Y. et al. Nature Biotech 2008. Vol. 26, p431). The vitamin A (VA)-liposome-siRNA formulation consisted of 0.33 μmol/ml of VA, 0.33 μmol/ml of liposome (Coatsome EL-01-D, NOF Corporation) and 0.5 μg/μl of siRNA in 5% glucose solution.

[0395] Injection Solution for siRNA Delivered at a Concentration of 0.75 mg/Kg

[0396] The liposomes were prepared at a concentration of 1 mM by addition of nuclease-free water, and left for 15 min at room temperature before use. To prepare VA-coupled liposomes, 100 nmol of vitamin A (dissolved in DMSO) was mixed with the liposomes (100 nmol) by vortex for 15 seconds at R.T.

[0397] The siRNA duplexes (150 μg) were prepared at a concentration of 10 μg/μl by addition of nuclease-free water. A 5% glucose (175 μl) solution was added to the liposomal suspension. (Total volume of 300 μl). The VA-liposome-siRNA solutions were injected to each rat to a final concentration of 0.75 ml/Kg body weight.

[0398] Injection solution for siRNA delivered at a concentration of 1.5 mg/Kg

[0399] The liposomes were prepared at a concentration of 1 mM by addition of nuclease-free water, and left to stand for 15 min before use. To prepare VA-coupled liposome, 200 nmol of vitamin A (dissolved in DMSO) was mixed with the liposome (200 nmol) by vortex for 15 seconds at R.T.

[0400] The siRNA duplexes (300 μg) were prepared at a concentration of 10 μg/μl by addition of nuclease-free water. A 5% glucose (50 μl) solution was added to the liposomal suspension. (Total volume 300 μl). The VA-liposome-siRNA solutions were injected to each rat to a final concentration of 1.5 ml/Kg body weight.

[0401] siRNA Treatment

[0402] The siRNA treatment was carried out from day 28 for 5 times by intravenous injection. In detail, rats were treated with siRNA on days 28, 30, 32, 34 and 36 post DMN treatment. Rats were sacrificed on day 38 or 39. Two different siRNA species (siTIMP1-A and siTIMP2-C) and 2 different doses (0.75 mg siRNA per kg body weight, 1.5 mg siRNA per kg body weight) were tested. Details of tested groups and number of animals in each group are as follows:
[0403] 1) Control animals: Liver cirrhosis was induced by DMN injection, and a 5% glucose was administered (n=9)
[0404] 2) VA-Lip-siTIMP1-A 0.75 mg/Kg (n=9)
[0405] 3) VA-Lip-siTIMP1-A 1.5 mg/Kg (n=9)
[0406] 4) VA-Lip-siTIMP2-C 0.75 mg/Kg (n=9)
[0407] 5) VA-Lip-siTIMP2-C1.5 mg/Kg (n=9)
[0408] 6) Sham (PBS was injected instead of DMN. 5% Glucose was administered instead of siRNA) (n=5)
[0409] 7) Untreated control animals (Intact) (n=5)

[0410] Evaluation of Therapeutic Efficacy

[0411] On day 38, 2 out of 10 animals in “siTIMP2-C” group died and were not analyzed further. However, other animals were survived before the sacrifice. After rats were sacrificed, liver tissues were fixed in 10% formalin. The left lobe of the liver was embedded in paraffin for tissue slide preparation. Tissue slides were stained with Sirius red as well as hematoxylin and eosin (HE). Sirius red staining was employed to visualize collagen-deposited area and determine the level of cirrhosis. HE staining was used for nuclei and cytoplasm as counter-staining Each slide was observed under microscope (BZ-9000, Keyence Corp. Japan) and the percentage of Sirius red-stained area per slide was determined by image analysis software attached to the microscope. At least 4 slides per each liver were prepared for image analysis, and whole area of each slide (slice of liver) was captured by camera and analyzed. Statistic analysis was carried out by t-test analysis. Results are shown in FIG. 4. Liver sections were photographed at ×32 magnification. The fibrotic areas were calculated as the mean of 4 liver sections. The bar graph summarizes the digital quantification of staining for each group. Statistical values are as follows: *=P<0.05, **=P<0.01, ***=P<0.001

[0412] FIG. 4 represents the fibrotic area in liver sections. The area of fibrosis in the “diseased rat” (group 1) was higher than “sham” (group 6) or “untreated” (group 7) groups. Therefore, DMN treatment induced collagen deposition in liver, typical of liver fibrosis. The area of fibrosis was significantly reduced by the treatment of siRNA targeting TIMP1 gene (groups 2 and 3), compared with “diseased rat” group, indicating that siRNA to TIMP1 has therapeutic efficacy in treating fibrotic diseases and disorders.

### Example 5

### Selecting TIMP1 and TIMP2 Nucleic Acid Molecule Sequences

[0413] Nucleic acid molecules (e.g., siNA≦25 nucleotides) against TIMP1 and TIMP2 were designed using a proprietary database. Candidate sequences are validated by in vitro knock down assays. Details of the nucleic acids set forth in the Tables are

[0414] The Tables (A1, A2, A5, A6, B1, B2, B5, B6) include
[0415] a. 19-mer and 18-mer siRNAs (sense and corresponding antisense sequences to form duplex siRNA) predicted to be active by a proprietary database and excludes known 19-mer siRNAs;
[0416] b. siRNAs which target human and at least two additional species (cross species) selected from dog, rat, mouse and rabbit and are predicted to be active;
   [0417] i. inclusion of cross-species siRNA compounds are siRNA with full match to the indicated target (“Sense”) and
   [0418] ii. inclusion of siRNAs with mismatches relative to the target, at positions 1, 19 (5′>3′) or both.

[0419] The Tables of “preferred” siRNA (A3, A7, B3, B7) include sense and corresponding antisense sequences that were selected as follows:
[0420] i. Selection for cross species to human (H) and rat (Rt) and inclusion of sequences with 1 MM (single mismatch (MM)) to rat target in positions other than 1/19 (5′>3′)
[0421] ii. Addition of predicted active siRNA compounds that don't target rat but target at least two other species selected from dog, mouse and rabbit.
[0422] iii. Addition of best siRNA targeting human or human+rhesus
[0423] iv. Exclusion of siRNAs that target miRNA seed sequence
[0424] v. Exclusion of siRNAs with high G/C content
[0425] vi. Exclusion of siRNAs targeting multiple SNPs

[0426] The Tables labeled as “lowest predicted OT effect” (Tables A4, A8, B4 and B8) relate to siRNA from the “preferred” Tables having best off-target (OT) features including
[0427] c. Column labeled “Crosses”—Indicates species specificity as follows:
   [0428] i. H/Rt=siRNA targeting at least human and rat
   [0429] ii. H/Rt (Rt cross—with 1MM)=siRNA targeting at least human and rat. Target match to rat is partial and there is one mismatch at a position other than 1 or 19
   [0430] iii. Other (w/o Rt)—siRNA targets human and other species but not rat
   [0431] iv. H+/−Rh=siRNA targeting only human or human and Rhesus but no other species

[0432] Column labeled “# in HTS list”—Indicates the siRNA number in the preceding “Preferred” Table (A3, A7, B3, B7).
[0433] 2. Selection is done in the following manner:
   [0434] i. Mismatches (MM) are identified in positions 2-18 of the guide strand. MM in positions 1 and 19 are NOT considered as mismatches.
   [0435] ii. Exclusion of siRNAs having complete match (0 MM) to other genes
   [0436] iii. Exclusion of siRNAs having 1 MM in position 17 or 18 (of AS strand) to other genes
   [0437] iv. Preference (ranking of predicted OT activity):
      [0438] 1—has 3MM within positions 2-16 of AS (5′>3′).
      [0439] 2—has 2MM to 1-4 gene targets within positions 2-16
      [0440] 3—has 2MM to 5-9 gene targets within (positions 2-16)
      [0441] 4—targets 10-20 genes with 2MM (positions 2-16)

[0442] Sequences of sense and antisense oligonucleotides useful in the preparation of siRNA molecules are disclosed in Tables A1, A2, A3, A4, A5, A6, A7, A8, B1, B2, B3, B4, B5, B6, B7, B8 (Tables A1-B8) infra. Best OT refers to least number of matches to off-target genes.

[0443] The following abbreviations are used in the Tables A1-B8 (Tables A1, A2, A3, A4, A5, A6, A7 A8, B1, B2, B3, B4, B5, B6, B7 and B8) herein: “other spec or Sp.” refers to cross species identity with other animals: D or Dg-dog, Rt-rat, Rb-rabbit, Rh-rhesus monkey, Pg-Pig, M or Ms-Mouse, Ck-Chicken, Cw-Cow; ORF: open reading frame. 19-mers, and 18+1-mers refer to oligomers of 19 and 18+1 (U at position 1 of Antisense, A at position 19 of sense strand or A at position 1 of Antisense, U at position 19 of sense strand) ribonucleic acids in length, respectively.

TABLE A1
19-mer siTIMP1

| | | | | | | |
|---|---|---|---|---|---|---|
| | | SEQ | | SEQ | | |
| | | ID | | ID | | human-73858576 |
| No. | Sense (5′>3′) | NO. | Antisense (5′>3′) | NO. | Other Sp | ORF: 193-816 |

| | | | | | | |
|---|---|---|---|---|---|---|
| 1 | GUUUCUCAUUGCUGGAAAA | 21 | UUUUCCAGCAAUGAGAAAC | 129 | Rh | [506-524] ORF |
| 2 | CACAGUGUUUCCCUGUUUA | 22 | UAAACAGGGAAACACUGUG | 130 | Rh, M | [641-659] ORF |
| 3 | CUUUCUUCCGGACAAUGAA | 23 | UUCAUUGUCCGGAAGAAAG | 131 | | [874-892] 3′UTR |
| 4 | GCUGAAGCCUGCACAGUGU | 24 | ACACUGUGCAGGCUUCAGC | 132 | | [834-852] 3′UTR |
| 5 | GGAGUUUCUCAUUGCUGGA | 25 | UCCAGCAAUGAGAAACUCC | 133 | Rh | [503-521] ORF |
| 6 | GCACAGUGUUUCCCUGUUU | 26 | AAACAGGGAAACACUGUGC | 134 | Rh, Rt, M | [640-658] ORF |
| 7 | CAUCUUUCUUCCGGACAAU | 27 | AUUGUCCGGAAGAAAGAUG | 135 | | [871-889] 3′UTR |
| 8 | GGCUUCACCAAGACCUACA | 28 | UGUAGGUCUUGGUGAAGCC | 136 | Rh, Rb | [603-621] ORF |
| 9 | GGCACUCAUUGCUUGUGGA | 29 | UCCACAAGCAAUGAGUGCC | 137 | Rh | [684-702] ORF |
| 10 | CUCCCAUCUUUCUUCCGGA | 30 | UCCGGAAGAAAGAUGGGAG | 138 | | [867-885] 3′UTR |
| 11 | GUGUUUCCCUGUUUAUCCA | 31 | UGGAUAAACAGGGAAACAC | 139 | Rh | [645-663] ORF |
| 12 | AGUCAACCAGACCACCUUA | 32 | UAAGGUGGUCUGGUUGACU | 140 | Rh | [344-362] ORF |
| 13 | GCCCGGAGUGGAAGCUGAA | 33 | UUCAGCUUCCACUCCGGGC | 141 | | [821-839] 3′UTR |
| 14 | CCACCUUAUACCAGCGUUA | 34 | UAACGCUGGUAUAAGGUGG | 142 | Rh, Rt, M | [355-373] ORF |
| 15 | CAUGGAGAGUGUCUGCGGA | 35 | UCCGCAGACACUCUCCAUG | 143 | Rh | [455-473] ORF |
| 16 | CCAAGAUGUAUAAAGGGUU | 36 | AACCCUUUAUACAUCUUGG | 144 | Rh | [388-406] ORF |
| 17 | GAGAGUGUCUGCGGAUACU | 37 | AGUAUCCGCAGACACUCUC | 145 | Rh | [459-477] ORF |
| 18 | AGAUCAAGAUGACCAAGAU | 38 | AUCUUGGUCAUCUUGAUCU | 146 | Rh, Dg | [376-394] ORF |
| 19 | CUGCAGAGUGGCACUCAUU | 39 | AAUGAGUGCCACUCUGCAG | 147 | Rh | [675-693] ORF |
| 20 | CCUGGAACAGCCUGAGCUU | 40 | AAGCUCAGGCUGUUCCAGG | 148 | | [571-589] ORF |
| 21 | CACUGUUGGCUGUGAGGAA | 41 | UUCCUCACAGCCAACAGUG | 149 | Rh | [620-638] ORF |
| 22 | CCAGAAGUCAACCAGACCA | 42 | UGGUCUGGUUGACUUCUGG | 150 | Rh, Dg | [339-357] ORF |
| 23 | GAUGGACUCUUGCACAUCA | 43 | UGAUGUGCAAGAGUCCAUC | 151 | | [531-549] ORF |
| 24 | AGUUUCUCAUUGCUGGAAA | 44 | UUUCCAGCAAUGAGAAACU | 152 | Rh | [505-523] ORF |
| 25 | GCUCCUCCAAGGCUCUGAA | 45 | UUCAGAGCCUUGGAGGAGC | 153 | Rh | [710-728] ORF |
| 26 | ACAGUGUUUCCCUGUUUAU | 46 | AUAAACAGGGAAACACUGU | 154 | Rh, M | [642-660] ORF |
| 27 | GUCUGCGGAUACUUCCACA | 47 | UGUGGAAGUAUCCGCAGAC | 155 | Rh | [465-483] ORF |
| 28 | CUGGAACAGCCUGAGCUUA | 48 | UAAGCUCAGGCUGUUCCAG | 156 | | [572-590] ORF |
| 29 | GGGCUGUGCACCUGGCAGU | 49 | ACUGCCAGGUGCACAGCCC | 157 | Rh | [774-792] ORF |
| 30 | GUGUCUGCGGAUACUUCCA | 50 | UGGAAGUAUCCGCAGACAC | 158 | Rh | [463-481] ORF |
| 31 | AUGAGAUCAAGAUGACCAA | 51 | UUGGUCAUCUUGAUCUCAU | 159 | Rh, Dg | [373-391] ORF |
| 32 | GGAAGCUGAAGCCUGCACA | 52 | UGUGCAGGCUUCAGCUUCC | 160 | | [830-848] 3′UTR |
| 33 | GAGUUUCUCAUUGCUGGAA | 53 | UUCCAGCAAUGAGAAACUC | 161 | Rh | [504-522] ORF |
| 34 | CAGACGGCCUUCUGCAAUU | 54 | AAUUGCAGAAGGCCGUCUG | 162 | Rh | [285-303] ORF |
| 35 | GCACAUCACUACCUGCAGU | 55 | ACUGCAGGUAGUGAUGUGC | 163 | | [542-560] ORF |
| 36 | GGCAGUCCCUGCGGUCCCA | 56 | UGGGACCGCAGGGACUGCC | 164 | | [787-805] ORF |
| 37 | GAUGUAUAAAGGGUUCCAA | 57 | UUGGAACCCUUUAUACAUC | 165 | Rh | [392-410] ORF |
| 38 | CUGGCAUCCUGUUGUUGCU | 58 | AGCAACAACAGGAUGCCAG | 166 | | [217-235] ORF |
| 39 | GGACGGACCAGCUCCUCCA | 59 | UGGAGGAGCUGGUCCGUCC | 167 | Rh | [700-718] ORF |
| 40 | GAGUGGCACUCAUUGCUUG | 60 | CAAGCAAUGAGUGCCACUC | 168 | Rh | [680-698] ORF |
| 41 | AGAGUGUCUGCGGAUACUU | 61 | AAGUAUCCGCAGACACUCU | 169 | Rh | [460-478] ORF |
| 42 | ACCAGACCACCUUAUACCA | 62 | UGGUAUAAGGUGGUCUGGU | 170 | Rh | [349-367] ORF |
| 43 | CACCAAGACCUACACUGUU | 63 | AACAGUGUAGGUCUUGGUG | 171 | Rh | [608-626] ORF |
| 44 | GGCAUCCUGUUGUUGCUGU | 64 | ACAGCAACAACAGGAUGCC | 172 | Rh | [219-237] ORF |
| 45 | CCUGAAUCCUGCCCGGAGU | 65 | ACUCCGGGCAGGAUUCAGG | 173 | | [811-829] ORF + 3′UTR |
| 46 | GUCAACCAGACCACCUUAU | 66 | AUAAGGUGGUCUGGUUGAC | 174 | Rh | [345-363] ORF |
| 47 | GGACACCAGAAGUCAACCA | 67 | UGGUUGACUUCUGGUGUCC | 175 | Rh | [334-352] ORF |
| 48 | AGCGUUAUGAGAUCAAGAU | 68 | AUCUUGAUCUCAUAACGCU | 176 | Rh, Dg, Rt | [367-385] ORF |
| 49 | UGCACAGUGUUUCCCUGUU | 69 | AACAGGGAAACACUGUGCA | 177 | Rh, Rt, M | [639-657] ORF |
| 50 | ACUGCAGAGUGGCACUCAU | 70 | AUGAGUGCCACUCUGCAGU | 178 | Rh | [674-692] ORF |
| 51 | CCCAUCUUUCUUCCGGACA | 71 | UGUCCGGAAGAAAGAUGGG | 179 | | [869-887] 3′UTR |
| 52 | GUGAGGAAUGCACAGUGUU | 72 | AACACUGUGCAUUCCUCAC | 180 | Rh | [631-649] ORF |
| 53 | CCUCCAAGGCUCUGAAAAG | 73 | CUUUUCAGAGCCUUGGAGG | 181 | Rh | [713-731] ORF |
| 54 | CAUCACUACCUGCAGUUUU | 74 | AAAACUGCAGGUAGUGAUG | 182 | | [545-563] ORF |
| 55 | AGCUGAAGCCUGCACAGUG | 75 | CACUGUGCAGGCUUCAGCU | 183 | | [833-851] 3′UTR |
| 56 | GCACAGUGUCCACCCUGUU | 76 | AACAGGGUGGACACUGUGC | 184 | | [844-862] 3′UTR |
| 57 | CCAGCUCCUCCAAGGCUCU | 77 | AGAGCCUUGGAGGAGCUGG | 185 | Rh | [707-725] ORF |
| 58 | CUGUUGUUGCUGUGGCUGA | 78 | UCAGCCACAGCAACAACAG | 186 | Rh | [225-243] ORF |
| 59 | UCUUCCGGACAAUGAAAUA | 79 | UAUUUCAUUGUCCGGAAGA | 187 | | [877-895] 3′UTR |
| 60 | GCUCCCUGGAACAGCCUGA | 80 | UCAGGCUGUUCCAGGGAGC | 188 | | [567-585] ORF |
| 61 | AUAAAGGGUUCCAAGCCUU | 81 | AAGGCUUGGAACCCUUUAU | 189 | | [397-415] ORF |
| 62 | GAGUGGAAGCUGAAGCCUG | 82 | CAGGCUUCAGCUUCCACUC | 190 | Rh | [826-844] 3′UTR |
| 63 | CAAACUGCAGAGUGGCACU | 83 | AGUGCCACUCUGCAGUUUG | 191 | Rh | [671-689] ORF |
| 64 | CGGCCUUCUGCAAUUCCGA | 84 | UCGGAAUUGCAGAAGGCCG | 192 | Rh | [289-307] ORF |
| 65 | CUCCUCCAAGGCUCUGAAA | 85 | UUUCAGAGCCUUGGAGGAG | 193 | Rh | [711-729] ORF |
| 66 | CCUGCAAACUGCAGAGUGG | 86 | CCACUCUGCAGUUUGCAGG | 194 | Rh, Dg | [667-685] ORF |
| 67 | CACAUCACUACCUGCAGUU | 87 | AACUGCAGGUAGUGAUGUG | 195 | | [543-561] ORF |
| 68 | UGCCCGGAGUGGAAGCUGA | 88 | UCAGCUUCCACUCCGGGCA | 196 | | [820-838] 3′UTR |
| 69 | GCUUCUGGCAUCCUGUUGU | 89 | ACAACAGGAUGCCAGAAGC | 197 | | [213-231] ORF |
| 70 | UUUCUUCCGGACAAUGAAA | 90 | UUUCAUUGUCCGGAAGAAA | 198 | | [875-893] 3′UTR |
| 71 | UGCACAGUGUCCACCCUGU | 91 | ACAGGGUGGACACUGUGCA | 199 | | [843-861] 3′UTR |
| 72 | GACCUACACUGUUGGCUGU | 92 | ACAGCCAACAGUGUAGGUC | 200 | Rh | [614-632] ORF |
| 73 | CACAGACGGCCUUCUGCAA | 93 | UUGCAGAAGGCCGUCUGUG | 201 | Rh | [283-301] ORF |
| 74 | AGGGCUUCCAGUCCCGUCA | 94 | UGACGGGACUGGAAGCCCU | 202 | Rh | [730-748] ORF |
| 75 | CCCAGAUAGCCUGAAUCCU | 95 | AGGAUUCAGGCUAUCUGGG | 203 | | [802-820] ORF + 3′UTR |
| 76 | GUUGUUGCUGUGGCUGAUA | 96 | UAUCAGCCACAGCAACAAC | 204 | Rh | [227-245] ORF |
| 77 | GUCCCUGCGGUCCCAGAUA | 97 | UAUCUGGGACCGCAGGGAC | 205 | | [791-809] ORF |
| 78 | CUUCCAGUCCCGUCACCUU | 98 | AAGGUGACGGGACUGGAAG | 206 | Rh | [734-752] ORF |
| 79 | CCUACACUGUUGGCUGUGA | 99 | UCACAGCCAACAGUGUAGG | 207 | Rh | [616-634] ORF |
| 80 | ACAUCACUACCUGCAGUUU | 100 | AAACUGCAGGUAGUGAUGU | 208 | | [544-562] ORF |
| 81 | UCUUUCUUCCGGACAAUGA | 101 | UCAUUGUCCGGAAGAAAGA | 209 | | [873-891] 3′UTR |
| 82 | CCAGAUAGCCUGAAUCCUG | 102 | CAGGAUUCAGGCUAUCUGG | 210 | | [803-821] ORF + 3′UTR |
| 83 | CAGUGUUUCCCUGUUUAUC | 103 | GAUAAACAGGGAAACACUG | 211 | Rh, M | [643-661] ORF |
| 84 | CUGGCUUCUGGCAUCCUGU | 104 | ACAGGAUGCCAGAAGCCAG | 212 | | [210-228] ORF |
| 85 | GACGGACCAGCUCCUCCAA | 105 | UUGGAGGAGCUGGUCCGUC | 213 | Rh | [701-719] ORF |
| 86 | UGUUGUUGCUGUGGCUGAU | 106 | AUCAGCCACAGCAACAACA | 214 | Rh | [226-244] ORF |
| 87 | GACUCUUGCACAUCACUAC | 107 | GUAGUGAUGUGCAAGAGUC | 215 | | [535-553] ORF |
| 88 | CCCGCCAUGGAGAGUGUCU | 108 | AGACACUCUCCAUGGCGGG | 216 | Rh | [450-468] ORF |
| 89 | CGAGGAGUUUCUCAUUGCU | 109 | AGCAAUGAGAAACUCCUCG | 217 | Rh | [500-518] ORF |
| 90 | CACAGGUCCCACAACCGCA | 110 | UGCGGUUGUGGGACCUGUG | 218 | Rh | [480-498] ORF |
| 91 | ACACCAGAAGUCAACCAGA | 111 | UCUGGUUGACUUCUGGUGU | 219 | Rh | [336-354] ORF |
| 92 | UGUUCCCACUCCCAUCUUU | 112 | AAAGAUGGGAGUGGGAACA | 220 | Rh | [859-877] 3′UTR |
| 93 | CCCUGUUCCCACUCCCAUC | 113 | GAUGGGAGUGGGAACAGGG | 221 | Rh | [856-874] 3′UTR |
| 94 | CACCUUAUACCAGCGUUAU | 114 | AUAACGCUGGUAUAAGGUG | 222 | Rh, Rt, M | [356-374] ORF |
| 95 | CACCAGAAGUCAACCAGAC | 115 | GUCUGGUUGACUUCUGGUG | 223 | Rh | [337-355] ORF |
| 96 | UCCUCCAAGGCUCUGAAAA | 116 | UUUUCAGAGCCUUGGAGGA | 224 | Rh | [712-730] ORF |
| 97 | GAAGCCUGCACAGUGUCCA | 117 | UGGACACUGUGCAGGCUUC | 225 | | [837-855] 3′UTR |
| 98 | CCUGCACAGUGUCCACCCU | 118 | AGGGUGGACACUGUGCAGG | 226 | | [841-859] 3′UTR |
| 99 | CCGCCAUGGAGAGUGUCUG | 119 | CAGACACUCUCCAUGGCGG | 227 | Rh | [451-469] ORF |
| 100 | UAAAGGGUUCCAAGCCUUA | 120 | UAAGGCUUGGAACCCUUUA | 228 | | [398-416] ORF |
| 101 | CAAGAUGACCAAGAUGUAU | 121 | AUACAUCUUGGUCAUCUUG | 229 | Rh | [380-398] ORF |
| 102 | GUUUUGUGGCUCCCUGGAA | 122 | UUCCAGGGAGCCACAAAAC | 230 | | [559-577] ORF |
| 103 | GGAGUGGAAGCUGAAGCCU | 123 | AGGCUUCAGCUUCCACUCC | 231 | Rh | [825-843] 3′UTR |
| 104 | CUGACAUCCGGUUCGUCUA | 124 | UAGACGAACCGGAUGUCAG | 232 | Rh | [427-445] ORF |
| 105 | GCGUUAUGAGAUCAAGAUG | 125 | CAUCUUGAUCUCAUAACGC | 233 | Rh, Dg, Rt | [368-386] ORF |
| 106 | CGGACCAGCUCCUCCAAGG | 126 | CCUUGGAGGAGCUGGUCCG | 234 | Rh | [703-721] ORF |
| 107 | CAGGAUGGACUCUUGCACA | 127 | UGUGCAAGAGUCCAUCCUG | 235 | | [528-546] ORF |
| 108 | CAAGAUGUAUAAAGGGUUC | 128 | GAACCCUUUAUACAUCUUG | 236 | Rh | [389-407] ORF |

TABLE A2
19-mer Cross-Species siTIMP1

| | | | | | | |
|---|---|---|---|---|---|---|
| | | SEQ | | SEQ | | |
| | | ID | | ID | | human-73858576 |
| No. | Sense (5′>3′) | NO. | Antisense (5′>3′) | NO. | Other Sp | ORF: 193-816 |

| | | | | | | |
|---|---|---|---|---|---|---|
| 1 | ACCACCUUAUACCAGCGUU | 237 | AACGCUGGUAUAAGGUGGU | 252 | Rh, Rt, M | [354-372] ORF |
| 2 | ACCGCAGCGAGGAGUUUCU | 238 | AGAAACUCCUCGCUGCGGU | 253 | Rh, Rb, Dg, Rt | [493-511] ORF |
| 3 | AGACCACCUUAUACCAGCG | 239 | CGCUGGUAUAAGGUGGUCU | 254 | Rh, Rt, M | [352-370] ORF |
| 4 | GGGCUUCACCAAGACCUAC | 240 | GUAGGUCUUGGUGAAGCCC | 255 | Rh, Rb, Dg | [602-620] ORF |
| 5 | CAACCGCAGCGAGGAGUUU | 241 | AAACUCCUCGCUGCGGUUG | 256 | Rh, Rb, Dg, Rt | [491-509] ORF |
| 6 | CAGACCACCUUAUACCAGC | 242 | GCUGGUAUAAGGUGGUCUG | 257 | Rh, Rt, M | [351-369] ORF |
| 7 | ACCUUAUACCAGCGUUAUG | 243 | CAUAACGCUGGUAUAAGGU | 258 | Rh, Rt, M | [357-375] ORF |
| 8 | CGUCAUCAGGGCCAAGUUC | 244 | GAACUUGGCCCUGAUGACG | 259 | Rh, Rb, Dg | [311-329] ORF |
| 9 | AUGCACAGUGUUUCCCUGU | 245 | ACAGGGAAACACUGUGCAU | 260 | Rh, Rt, M | [638-656] ORF |
| 10 | ACCUGGCAGUCCCUGCGGU | 246 | ACCGCAGGGACUGCCAGGU | 261 | Rh, Rb, Dg | [783-801] ORF |
| 11 | GACCACCUUAUACCAGCGU | 247 | ACGCUGGUAUAAGGUGGUC | 262 | Rh, Rt, M | [353-371] ORF |
| 12 | CCGCAGCGAGGAGUUUCUC | 248 | GAGAAACUCCUCGCUGCGG | 263 | Rh, Rb, Dg, Rt | [494-512] ORF |
| 13 | AACCGCAGCGAGGAGUUUC | 249 | GAAACUCCUCGCUGCGGUU | 264 | Rh, Rb, Dg, Rt | [492-510] ORF |
| 14 | UUAUGAGAUCAAGAUGACC | 250 | GGUCAUCUUGAUCUCAUAA | 265 | Rh, Dg, Rt | [371-389] ORF |
| 15 | ACCAGCGUUAUGAGAUCAA | 251 | UUGAUCUCAUAACGCUGGU | 266 | Rh, Rt | [364-382] ORF |

TABLE A3
Preferred 19-mer siTIMP1

| | | SEQ | | SEQ | | human- |
|---|---|---|---|---|---|---|
| | | ID | | ID | | 73858576 |
| siTIMP1_pNo. | Sense (5′>3′) | NO. | Antisense (5′>3′) | NO. | length | ORF: 193-816 |
| siTIMP1_p2 | GCACAGUGUUUCCCUGUUU | 267 | AAACAGGGAAACACUGUGC | 299 | 19 | [640-658] ORF |
| siTIMP1_p6 | CCACCUUAUACCAGCGUUA | 268 | UAACGCUGGUAUAAGGUGG | 300 | 19 | [355-373] ORF |
| siTIMP1_p14 | UGCACAGUGUUUCCCUGUU | 269 | AACAGGGAAACACUGUGCA | 301 | 19 | [639-657] ORF |
| siTIMP1_p16 | CACCUUAUACCAGCGUUAU | 270 | AUAACGCUGGUAUAAGGUG | 302 | 19 | [356-374] ORF |
| siTIMP1_p17 | GCGUUAUGAGAUCAAGAUG | 271 | CAUCUUGAUCUCAUAACGC | 303 | 19 | [368-386] ORF |
| siTIMP1_p19 | ACCACCUUAUACCAGCGUU | 272 | AACGCUGGUAUAAGGUGGU | 304 | 19 | [354-372] ORF |
| siTIMP1_p20 | ACCGCAGCGAGGAGUUUCU | 273 | AGAAACUCCUCGCUGCGGU | 305 | 19 | [493-511] ORF |
| siTIMP1_p21 | ACCAGCGUUAUGAGAUCAA | 274 | UUGAUCUCAUAACGCUGGU | 306 | 19 | [364-382] ORF |
| siTIMP1_p23 | CAACCGCAGCGAGGAGUUU | 275 | AAACUCCUCGCUGCGGUUG | 307 | 19 | [491-509] ORF |
| siTIMP1_p24 | CAGACCACCUUAUACCAGC | 276 | GCUGGUAUAAGGUGGUCUG | 308 | 19 | [351-369] ORF |
| siTIMP1_p27 | AGAUCAAGAUGACCAAGAU | 277 | AUCUUGGUCAUCUUGAUCU | 309 | 19 | [376-394] ORF |
| siTIMP1_p29 | CCAGAAGUCAACCAGACCA | 278 | UGGUCUGGUUGACUUCUGG | 310 | 19 | [339-357] ORF |
| siTIMP1_p31 | AUGAGAUCAAGAUGACCAA | 279 | UUGGUCAUCUUGAUCUCAU | 311 | 19 | [373-391] ORF |
| siTIMP1_p33 | CCUGCAAACUGCAGAGUGG | 280 | CCACUCUGCAGUUUGCAGG | 312 | 19 | [667-685] ORF |
| siTIMP1_p38 | CACAGUGUUUCCCUGUUUA | 281 | UAAACAGGGAAACACUGUG | 313 | 19 | [641-659] ORF |
| siTIMP1_p42 | ACAGUGUUUCCCUGUUUAU | 282 | AUAAACAGGGAAACACUGU | 314 | 19 | [642-660] ORF |
| siTIMP1_p43 | CAGUGUUUCCCUGUUUAUC | 283 | GAUAAACAGGGAAACACUG | 315 | 19 | [643-661] ORF |
| siTIMP1_p45 | CUUUCUUCCGGACAAUGAA | 284 | UUCAUUGUCCGGAAGAAAG | 316 | 19 | [874-892] 3′UTR |
| siTIMP1_p49 | GUUUCUCAUUGCUGGAAAA | 285 | UUUUCCAGCAAUGAGAAAC | 317 | 19 | [506-524] ORF |
| siTIMP1_p60 | CAUCUUUCUUCCGGACAAU | 286 | AUUGUCCGGAAGAAAGAUG | 318 | 19 | [871-889] 3′UTR |
| siTIMP1_p71 | CUCCCAUCUUUCUUCCGGA | 287 | UCCGGAAGAAAGAUGGGAG | 319 | 19 | [867-885] 3′UTR |
| siTIMP1_p73 | GUGUUUCCCUGUUUAUCCA | 288 | UGGAUAAACAGGGAAACAC | 320 | 19 | [645-663] ORF |
| siTIMP1_p77 | GCCCGGAGUGGAAGCUGAA | 289 | UUCAGCUUCCACUCCGGGC | 321 | 19 | [821-839] 3′UTR |
| siTIMP1_p78 | CAUGGAGAGUGUCUGCGGA | 290 | UCCGCAGACACUCUCCAUG | 322 | 19 | [455-473] ORF |
| siTIMP1_p79 | CCAAGAUGUAUAAAGGGUU | 291 | AACCCUUUAUACAUCUUGG | 323 | 19 | [388-406] ORF |
| siTIMP1_p85 | GAGAGUGUCUGCGGAUACU | 292 | AGUAUCCGCAGACACUCUC | 324 | 19 | [459-477] ORF |
| siTIMP1_p89 | CUGCAGAGUGGCACUCAUU | 293 | AAUGAGUGCCACUCUGCAG | 325 | 19 | [675-693] ORF |
| siTIMP1_p91 | CCUGGAACAGCCUGAGCUU | 294 | AAGCUCAGGCUGUUCCAGG | 326 | 19 | [571-589] ORF |
| siTIMP1_p96 | CACUGUUGGCUGUGAGGAA | 295 | UUCCUCACAGCCAACAGUG | 327 | 19 | [620-638] ORF |
| siTIMP1_p98 | GAUGGACUCUUGCACAUCA | 296 | UGAUGUGCAAGAGUCCAUC | 328 | 19 | [531-549] ORF |
| siTIMP1_p99 | AGUUUCUCAUUGCUGGAAA | 297 | UUUCCAGCAAUGAGAAACU | 329 | 19 | [505-523] ORF |
| siTIMP1_p108 | GUCUGCGGAUACUUCCACA | 298 | UGUGGAAGUAUCCGCAGAC | 330 | 19 | [465-483] ORF |

TABLE A4
19-mer siTIMP1 with lowest predicted OT effect

| | | | | SEQ | | SEQ |
|---|---|---|---|---|---|---|
| No. in TABLE | | | | ID | | ID |
| A3 | Cross species | Ranking | Sense (5′>3′) | NO. | Antisense (5′>3′) | NO. |
| siTIMP1_p2 | H/Rt | 3 | GCACAGUGUUUCCCUGUUU | 267 | AAACAGGGAAACACUGUGC | 299 |
| siTIMP1_p6 | H/Rt | 2 | CCACCUUAUACCAGCGUUA | 268 | UAACGCUGGUAUAAGGUGG | 300 |
| siTIMP1_p14 | H/Rt | 4 | UGCACAGUGUUUCCCUGUU | 269 | AACAGGGAAACACUGUGCA | 301 |
| siTIMP1_p16 | H/Rt | 1 | CACCUUAUACCAGCGUUAU | 270 | AUAACGCUGGUAUAAGGUG | 302 |
| siTIMP1_p17 | H/Rt | 2 | GCGUUAUGAGAUCAAGAUG | 271 | CAUCUUGAUCUCAUAACGC | 303 |
| siTIMP1_p19 | H/Rt | 2 | ACCACCUUAUACCAGCGUU | 272 | AACGCUGGUAUAAGGUGGU | 304 |
| siTIMP1_p20 | H/Rt | 3 | ACCGCAGCGAGGAGUUUCU | 273 | AGAAACUCCUCGCUGCGGU | 305 |
| siTIMP1_p21 | H/Rt | 3 | ACCAGCGUUAUGAGAUCAA | 274 | UUGAUCUCAUAACGCUGGU | 306 |
| siTIMP1_p23 | H/Rt | 3 | CAACCGCAGCGAGGAGUUU | 275 | AAACUCCUCGCUGCGGUUG | 307 |
| siTIMP1_p29 | Other (w/o Rt) | 3 | CCAGAAGUCAACCAGACCA | 278 | UGGUCUGGUUGACUUCUGG | 310 |
| siTIMP1_p33 | Other (w/o Rt) | 4 | CCUGCAAACUGCAGAGUGG | 280 | CCACUCUGCAGUUUGCAGG | 312 |
| siTIMP1_p38 | H/Rt (Rt Cross- | 3 | CACAGUGUUUCCCUGUUUA | 281 | UAAACAGGGAAACACUGUG | 313 |
| | with 1MM) | | | | | |
| siTIMP1_p42 | Other (w/o Rt) | 3 | ACAGUGUUUCCCUGUUUAU | 282 | AUAAACAGGGAAACACUGU | 314 |
| siTIMP1_p43 | Other (w/o Rt) | 3 | CAGUGUUUCCCUGUUUAUC | 283 | GAUAAACAGGGAAACACUG | 315 |
| siTIMP1_p45 | H +/− Rh | 4 | CUUUCUUCCGGACAAUGAA | 284 | UUCAUUGUCCGGAAGAAAG | 316 |
| siTIMP1_p60 | H +/− Rh | 2 | CAUCUUUCUUCCGGACAAU | 286 | AUUGUCCGGAAGAAAGAUG | 318 |
| siTIMP1_p71 | H +/− Rh | 4 | CUCCCAUCUUUCUUCCGGA | 287 | UCCGGAAGAAAGAUGGGAG | 319 |
| siTIMP1_p73 | H +/− Rh | 3 | GUGUUUCCCUGUUUAUCCA | 288 | UGGAUAAACAGGGAAACAC | 320 |
| siTIMP1_p78 | H +/− Rh | 3 | CAUGGAGAGUGUCUGCGGA | 290 | UCCGCAGACACUCUCCAUG | 322 |
| siTIMP1_p79 | H +/− Rh | 3 | CCAAGAUGUAUAAAGGGUU | 291 | AACCCUUUAUACAUCUUGG | 323 |
| siTIMP1_p85 | H +/− Rh | 2 | GAGAGUGUCUGCGGAUACU | 292 | AGUAUCCGCAGACACUCUC | 324 |
| siTIMP1_p89 | H +/− Rh | 3 | CUGCAGAGUGGCACUCAUU | 293 | AAUGAGUGCCACUCUGCAG | 325 |
| siTIMP1_p91 | H +/− Rh | 4 | CCUGGAACAGCCUGAGCUU | 294 | AAGCUCAGGCUGUUCCAGG | 326 |
| siTIMP1_p96 | H +/− Rh | 4 | CACUGUUGGCUGUGAGGAA | 295 | UUCCUCACAGCCAACAGUG | 327 |
| siTIMP1_p98 | H +/− Rh | 3 | GAUGGACUCUUGCACAUCA | 296 | UGAUGUGCAAGAGUCCAUC | 328 |
| siTIMP1_p99 | H +/− Rh | 4 | AGUUUCUCAUUGCUGGAAA | 297 | UUUCCAGCAAUGAGAAACU | 329 |
| siTIMP1_p108 | H +/− Rh | 2 | GUCUGCGGAUACUUCCACA | 298 | UGUGGAAGUAUCCGCAGAC | 330 |

TABLE A5
18-mer siTIMP1

| | | | | | | |
|---|---|---|---|---|---|---|
| | | SEQ | | SEQ | | |
| | | ID | | ID | | human-73858576 |
| No. | Sense (5′>3′) | NO. | Antisense (5′>3′) | NO. | Other Sp | ORF: 193-816 |

| | | | | | | |
|---|---|---|---|---|---|---|
| 1 | GGAGAGUGUCUGCGGAUA | 331 | UAUCCGCAGACACUCUCC | 582 | Rh | [458-475] ORF |
| 2 | GCUGAAGCCUGCACAGUG | 332 | CACUGUGCAGGCUUCAGC | 583 | | [834-851] 3′UTR |
| 3 | CAUCUUUCUUCCGGACAA | 333 | UUGUCCGGAAGAAAGAUG | 584 | | [871-888] 3′UTR |
| 4 | CCUCCAAGGCUCUGAAAA | 334 | UUUUCAGAGCCUUGGAGG | 585 | Rh | [713-730] ORF |
| 5 | CCGCCAUGGAGAGUGUCU | 335 | AGACACUCUCCAUGGCGG | 586 | Rh | [451-468] ORF |
| 6 | GAGUGUCUGCGGAUACUU | 336 | AAGUAUCCGCAGACACUC | 587 | Rh | [461-478] ORF |
| 7 | GAGUGGCACUCAUUGCUU | 337 | AAGCAAUGAGUGCCACUC | 588 | Rh | [680-697] ORF |
| 8 | AGCUGAAGCCUGCACAGU | 338 | ACUGUGCAGGCUUCAGCU | 589 | | [833-850] 3′UTR |
| 9 | AGAUCAAGAUGACCAAGA | 339 | UCUUGGUCAUCUUGAUCU | 590 | Rh, Dg | [376-393] ORF |
| 10 | GACUCUUGCACAUCACUA | 340 | UAGUGAUGUGCAAGAGUC | 591 | | [535-552] ORF |
| 11 | GAGUGGAAGCUGAAGCCU | 341 | AGGCUUCAGCUUCCACUC | 592 | Rh | [826-843] 3′UTR |
| 12 | CCUGCAAACUGCAGAGUG | 342 | CACUCUGCAGUUUGCAGG | 593 | Rh, Dg | [667-684] ORF |
| 13 | CAGUGUUUCCCUGUUUAU | 343 | AUAAACAGGGAAACACUG | 594 | Rh, Ms | [643-660] ORF |
| 14 | CCCUGUUCCCACUCCCAU | 344 | AUGGGAGUGGGAACAGGG | 595 | Rh | [856-873] 3′UTR |
| 15 | CCAGAUAGCCUGAAUCCU | 345 | AGGAUUCAGGCUAUCUGG | 596 | | [803-820] ORF + 3′UTR |
| 16 | GGUCCCAGAUAGCCUGAA | 346 | UUCAGGCUAUCUGGGACC | 597 | | [799-816] ORF |
| 17 | GGGCUUCACCAAGACCUA | 347 | UAGGUCUUGGUGAAGCCC | 598 | Rh, Rb, Dg | [602-619] ORF |
| 18 | GCGGAUACUUCCACAGGU | 348 | ACCUGUGGAAGUAUCCGC | 599 | Rh | [469-486] ORF |
| 19 | GAGAGUGUCUGCGGAUAC | 349 | GUAUCCGCAGACACUCUC | 600 | Rh | [459-476] ORF |
| 20 | GCGUUAUGAGAUCAAGAU | 350 | AUCUUGAUCUCAUAACGC | 601 | Rh, Dg, Rt | [368-385] ORF |
| 21 | GGAACAGCCUGAGCUUAG | 351 | CUAAGCUCAGGCUGUUCC | 602 | | [574-591] ORF |
| 22 | CUGAAAAGGGCUUCCAGU | 352 | ACUGGAAGCCCUUUUCAG | 603 | Rh | [724-741] ORF |
| 23 | CCAGCGUUAUGAGAUCAA | 353 | UUGAUCUCAUAACGCUGG | 604 | Rh, Rt | [365-382] ORF |
| 24 | CAACCAGACCACCUUAUA | 354 | UAUAAGGUGGUCUGGUUG | 605 | Rh | [347-364] ORF |
| 25 | GAGGAAUGCACAGUGUUU | 355 | AAACACUGUGCAUUCCUC | 606 | Rh | [633-650] ORF |
| 26 | CCAAGAUGUAUAAAGGGU | 356 | ACCCUUUAUACAUCUUGG | 607 | Rh | [388-405] ORF |
| 27 | CAGACCACCUUAUACCAG | 357 | CUGGUAUAAGGUGGUCUG | 608 | Rh, Rt, Ms | [351-368] ORF |
| 28 | AGUGGAAGCUGAAGCCUG | 358 | CAGGCUUCAGCUUCCACU | 609 | Rh | [827-844] 3′UTR |
| 29 | ACAGUGUUUCCCUGUUUA | 359 | UAAACAGGGAAACACUGU | 610 | Rh, Ms | [642-659] ORF |
| 30 | CGCCAUGGAGAGUGUCUG | 360 | CAGACACUCUCCAUGGCG | 611 | Rh | [452-469] ORF |
| 31 | CACCAGAAGUCAACCAGA | 361 | UCUGGUUGACUUCUGGUG | 612 | Rh | [337-354] ORF |
| 32 | CAGAAGUCAACCAGACCA | 362 | UGGUCUGGUUGACUUCUG | 613 | Rh | [340-357] ORF |
| 33 | CCCACUCCCAUCUUUCUU | 363 | AAGAAAGAUGGGAGUGGG | 614 | Rh | [863-880] 3′UTR |
| 34 | GCGAGGAGUUUCUCAUUG | 364 | CAAUGAGAAACUCCUCGC | 615 | Rh | [499-516] ORF |
| 35 | GCUUCACCAAGACCUACA | 365 | UGUAGGUCUUGGUGAAGC | 616 | Rh | [604-621] ORF |
| 36 | CAUCACUACCUGCAGUUU | 366 | AAACUGCAGGUAGUGAUG | 617 | | [545-562] ORF |
| 37 | AGCGUUAUGAGAUCAAGA | 367 | UCUUGAUCUCAUAACGCU | 618 | Rh, Dg, Rt | [367-384] ORF |
| 38 | CUGCAGAGUGGCACUCAU | 368 | AUGAGUGCCACUCUGCAG | 619 | Rh | [675-692] ORF |
| 39 | GAAGCUGAAGCCUGCACA | 369 | UGUGCAGGCUUCAGCUUC | 620 | | [831-848] 3′UTR |
| 40 | AUCACUACCUGCAGUUUU | 370 | AAAACUGCAGGUAGUGAU | 621 | | [546-563] ORF |
| 41 | GCACAGUGUUUCCCUGUU | 371 | AACAGGGAAACACUGUGC | 622 | Rh, Rt, Ms | [640-657] ORF |
| 42 | CCUGGAACAGCCUGAGCU | 372 | AGCUCAGGCUGUUCCAGG | 623 | | [571-588] ORF |
| 43 | GCAUCCUGUUGUUGCUGU | 373 | ACAGCAACAACAGGAUGC | 624 | Rh | [220-237] ORF |
| 44 | GUCCCAGAUAGCCUGAAU | 374 | AUUCAGGCUAUCUGGGAC | 625 | | [800-817] ORF + 3′UTR |
| 45 | AGUGUUUCCCUGUUUAUC | 375 | GAUAAACAGGGAAACACU | 626 | Rh, Ms | [644-661] ORF |
| 46 | GGCUGUGAGGAAUGCACA | 376 | UGUGCAUUCCUCACAGCC | 627 | Rh | [627-644] ORF |
| 47 | AGACCACCUUAUACCAGC | 377 | GCUGGUAUAAGGUGGUCU | 628 | Rh, Rt, Ms | [352-369] ORF |
| 48 | GGAUGGACUCUUGCACAU | 378 | AUGUGCAAGAGUCCAUCC | 629 | | [530-547] ORF |
| 49 | CGGACCAGCUCCUCCAAG | 379 | CUUGGAGGAGCUGGUCCG | 630 | Rh | [703-720] ORF |
| 50 | GGCCUUCUGCAAUUCCGA | 380 | UCGGAAUUGCAGAAGGCC | 631 | Rh | [290-307] ORF |
| 51 | GGGCUUCCAGUCCCGUCA | 381 | UGACGGGACUGGAAGCCC | 632 | Rh | [731-748] ORF |
| 52 | GCAGAGUGGCACUCAUUG | 382 | CAAUGAGUGCCACUCUGC | 633 | Rh | [677-694] ORF |
| 53 | CAGCGAGGAGUUUCUCAU | 383 | AUGAGAAACUCCUCGCUG | 634 | Rh, Rb, Rt | [497-514] ORF |
| 54 | CAGAUAGCCUGAAUCCUG | 384 | CAGGAUUCAGGCUAUCUG | 635 | | [804-821] ORF + 3′UTR |
| 55 | GCAGCGAGGAGUUUCUCA | 385 | UGAGAAACUCCUCGCUGC | 636 | Rh, Rb, Rt | [496-513] ORF |
| 56 | CCUGCAGUUUUGUGGCUC | 386 | GAGCCACAAAACUGCAGG | 637 | | [553-570] ORF |
| 57 | GUUAUGAGAUCAAGAUGA | 387 | UCAUCUUGAUCUCAUAAC | 638 | Rh, Dg, Rt | [370-387] ORF |
| 58 | CAAGAUGUAUAAAGGGUU | 388 | AACCCUUUAUACAUCUUG | 639 | Rh | [389-406] ORF |
| 59 | CCGGAGUGGAAGCUGAAG | 389 | CUUCAGCUUCCACUCCGG | 640 | Rh | [823-840] 3′UTR |
| 60 | AGGAGUUUCUCAUUGCUG | 390 | CAGCAAUGAGAAACUCCU | 641 | Rh | [502-519] ORF |
| 61 | GGCUGUGCACCUGGCAGU | 391 | ACUGCCAGGUGCACAGCC | 642 | Rh | [775-792] ORF |
| 62 | GUUUCCCUGUUUAUCCAU | 392 | AUGGAUAAACAGGGAAAC | 643 | Rh | [647-664] ORF |
| 63 | GCAGUUUUGUGGCUCCCU | 393 | AGGGAGCCACAAAACUGC | 644 | | [556-573] ORF |
| 64 | GUCAACCAGACCACCUUA | 394 | UAAGGUGGUCUGGUUGAC | 645 | Rh | [345-362] ORF |
| 65 | CCAUGGAGAGUGUCUGCG | 395 | CGCAGACACUCUCCAUGG | 646 | Rh | [454-471] ORF |
| 66 | CUGGCAUCCUGUUGUUGC | 396 | GCAACAACAGGAUGCCAG | 647 | | [217-234] ORF |
| 67 | CAGACGGCCUUCUGCAAU | 397 | AUUGCAGAAGGCCGUCUG | 648 | Rh | [285-302] ORF |
| 68 | ACUGCAGAGUGGCACUCA | 398 | UGAGUGCCACUCUGCAGU | 649 | Rh | [674-691] ORF |
| 69 | CGGAGUGGAAGCUGAAGC | 399 | GCUUCAGCUUCCACUCCG | 650 | Rh | [824-841] 3′UTR |
| 70 | GCCUCGGGAGCCAGGGCU | 400 | AGCCCUGGCUCCCGAGGC | 651 | Rh | [761-778] ORF |
| 71 | CCAGACCACCUUAUACCA | 401 | UGGUAUAAGGUGGUCUGG | 652 | Rh | [350-367] ORF |
| 72 | GGCUCUGAAAAGGGCUUC | 402 | GAAGCCCUUUUCAGAGCC | 653 | Rh | [720-737] ORF |
| 73 | GCUGGAAAACUGCAGGAU | 403 | AUCCUGCAGUUUUCCAGC | 654 | | [516-533] ORF |
| 74 | CCUGAAUCCUGCCCGGAG | 404 | CUCCGGGCAGGAUUCAGG | 655 | | [811-828] ORF + 3′UTR |
| 75 | CUGAAGCCUGCACAGUGU | 405 | ACACUGUGCAGGCUUCAG | 656 | | [835-852] 3′UTR |
| 76 | GGCAUCCUGUUGUUGCUG | 406 | CAGCAACAACAGGAUGCC | 657 | Rh | [219-236] ORF |
| 77 | CCCUGCAAACUGCAGAGU | 407 | ACUCUGCAGUUUGCAGGG | 658 | Rh, Dg | [666-683] ORF |
| 78 | CUGGAAAACUGCAGGAUG | 408 | CAUCCUGCAGUUUUCCAG | 659 | | [517-534] ORF |
| 79 | UCUCAUUGCUGGAAAACU | 409 | AGUUUUCCAGCAAUGAGA | 660 | Rh | [509-526] ORF |
| 80 | GUGGCUCCCUGGAACAGC | 410 | GCUGUUCCAGGGAGCCAC | 661 | | [564-581] ORF |
| 81 | CCAGCUCCUCCAAGGCUC | 411 | GAGCCUUGGAGGAGCUGG | 662 | Rh | [707-724] ORF |
| 82 | AGACCUACACUGUUGGCU | 412 | AGCCAACAGUGUAGGUCU | 663 | Rh | [613-630] ORF |
| 83 | GGGACACCAGAAGUCAAC | 413 | GUUGACUUCUGGUGUCCC | 664 | Rh | [333-350] ORF |
| 84 | GGCUCCCUGGAACAGCCU | 414 | AGGCUGUUCCAGGGAGCC | 665 | | [566-583] ORF |
| 85 | GUUCCCACUCCCAUCUUU | 415 | AAAGAUGGGAGUGGGAAC | 666 | Rh | [860-877] 3′UTR |
| 86 | CUCUGAAAAGGGCUUCCA | 416 | UGGAAGCCCUUUUCAGAG | 667 | Rh | [722-739] ORF |
| 87 | GGCUUCUGGCAUCCUGUU | 417 | AACAGGAUGCCAGAAGCC | 668 | | [212-229] ORF |
| 88 | AGGAAUGCACAGUGUUUC | 418 | GAAACACUGUGCAUUCCU | 669 | Rh | [634-651] ORF |
| 89 | CUUCUGGCAUCCUGUUGU | 419 | ACAACAGGAUGCCAGAAG | 670 | | [214-231] ORF |
| 90 | CAAACUGCAGAGUGGCAC | 420 | GUGCCACUCUGCAGUUUG | 671 | Rh | [671-688] ORF |
| 91 | AUACCAGCGUUAUGAGAU | 421 | AUCUCAUAACGCUGGUAU | 672 | Rh, Rt | [362-379] ORF |
| 92 | AGAGUGUCUGCGGAUACU | 422 | AGUAUCCGCAGACACUCU | 673 | Rh | [460-477] ORF |
| 93 | CACCAAGACCUACACUGU | 423 | ACAGUGUAGGUCUUGGUG | 674 | Rh | [608-625] ORF |
| 94 | GAUCAAGAUGACCAAGAU | 424 | AUCUUGGUCAUCUUGAUC | 675 | Rh, Dg | [377-394] ORF |
| 95 | AUGUAUAAAGGGUUCCAA | 425 | UUGGAACCCUUUAUACAU | 676 | | [393-410] ORF |
| 96 | ACCAAGACCUACACUGUU | 426 | AACAGUGUAGGUCUUGGU | 677 | Rh | [609-626] ORF |
| 97 | CCGUCACCUUGCCUGCCU | 427 | AGGCAGGCAAGGUGACGG | 678 | Rh | [743-760] ORF |
| 98 | GGGAGCCAGGGCUGUGCA | 428 | UGCACAGCCCUGGCUCCC | 679 | Rh | [766-783] ORF |
| 99 | UGCACAGUGUUUCCCUGU | 429 | ACAGGGAAACACUGUGCA | 680 | Rh, Rt, Ms | [639-656] ORF |
| 100 | UGCAGAGUGGCACUCAUU | 430 | AAUGAGUGCCACUCUGCA | 681 | Rh | [676-693] ORF |
| 101 | GUGAGGAAUGCACAGUGU | 431 | ACACUGUGCAUUCCUCAC | 682 | Rh | [631-648] ORF |
| 102 | AGCGAGGAGUUUCUCAUU | 432 | AAUGAGAAACUCCUCGCU | 683 | Rh | [498-515] ORF |
| 103 | GGGCUGUGCACCUGGCAG | 433 | CUGCCAGGUGCACAGCCC | 684 | Rh | [774-791] ORF |
| 104 | ACUCAUUGCUUGUGGACG | 434 | CGUCCACAAGCAAUGAGU | 685 | Rh | [687-704] ORF |
| 105 | UGUUGUUGCUGUGGCUGA | 435 | UCAGCCACAGCAACAACA | 686 | Rh | [226-243] ORF |
| 106 | UGAGGAAUGCACAGUGUU | 436 | AACACUGUGCAUUCCUCA | 687 | Rh | [632-649] ORF |
| 107 | CCUGGCUUCUGGCAUCCU | 437 | AGGAUGCCAGAAGCCAGG | 688 | | [209-226] ORF |
| 108 | GCACAGUGUCCACCCUGU | 438 | ACAGGGUGGACACUGUGC | 689 | | [844-861] 3′UTR |
| 109 | AAAGGGUUCCAAGCCUUA | 439 | UAAGGCUUGGAACCCUUU | 690 | | [399-416] ORF |
| 110 | GCUUCUGGCAUCCUGUUG | 440 | CAACAGGAUGCCAGAAGC | 691 | | [213-230] ORF |
| 111 | CCAAGACCUACACUGUUG | 441 | CAACAGUGUAGGUCUUGG | 692 | Rh | [610-627] ORF |
| 112 | AAGGGUUCCAAGCCUUAG | 442 | CUAAGGCUUGGAACCCUU | 693 | | [400-417] ORF |
| 113 | UGCACAGUGUCCACCCUG | 443 | CAGGGUGGACACUGUGCA | 694 | | [843-860] 3′UTR |
| 114 | GACCUACACUGUUGGCUG | 444 | CAGCCAACAGUGUAGGUC | 695 | Rh | [614-631] ORF |
| 115 | CCCAGAUAGCCUGAAUCC | 445 | GGAUUCAGGCUAUCUGGG | 696 | | [802-819] ORF + 3′UTR |
| 116 | GGGUUCCAAGCCUUAGGG | 446 | CCCUAAGGCUUGGAACCC | 697 | | [402-419] ORF |
| 117 | GGCUUCCAGUCCCGUCAC | 447 | GUGACGGGACUGGAAGCC | 698 | Rh | [732-749] ORF |
| 118 | AGUGUCUGCGGAUACUUC | 448 | GAAGUAUCCGCAGACACU | 699 | Rh | [462-479] ORF |
| 119 | UGACCAAGAUGUAUAAAG | 449 | CUUUAUACAUCUUGGUCA | 700 | Rh | [385-402] ORF |
| 120 | CAGCCUGAGCUUAGCUCA | 450 | UGAGCUAAGCUCAGGCUG | 701 | | [578-595] ORF |
| 121 | CUUCCGGACAAUGAAAUA | 451 | UAUUUCAUUGUCCGGAAG | 702 | | [878-895] 3′UTR |
| 122 | CUGUGAGGAAUGCACAGU | 452 | ACUGUGCAUUCCUCACAG | 703 | Rh | [629-646] ORF |
| 123 | GCCUGAAUCCUGCCCGGA | 453 | UCCGGGCAGGAUUCAGGC | 704 | | [810-827] ORF + 3′UTR |
| 124 | ACUGCAGGAUGGACUCUU | 454 | AAGAGUCCAUCCUGCAGU | 705 | | [524-541] ORF |
| 125 | GUCCCACAACCGCAGCGA | 455 | UCGCUGCGGUUGUGGGAC | 706 | Rh | [485-502] ORF |
| 126 | AUCUUUCUUCCGGACAAU | 456 | AUUGUCCGGAAGAAAGAU | 707 | | [872-889] 3′UTR |
| 127 | AUAAAGGGUUCCAAGCCU | 457 | AGGCUUGGAACCCUUUAU | 708 | | [397-414] ORF |
| 128 | UCCCAUCUUUCUUCCGGA | 458 | UCCGGAAGAAAGAUGGGA | 709 | | [868-885] 3′UTR |
| 129 | GAAAAGGGCUUCCAGUCC | 459 | GGACUGGAAGCCCUUUUC | 710 | Rh | [726-743] ORF |
| 130 | UGGAACAGCCUGAGCUUA | 460 | UAAGCUCAGGCUGUUCCA | 711 | | [573-590] ORF |
| 131 | CACCUUAUACCAGCGUUA | 461 | UAACGCUGGUAUAAGGUG | 712 | Rh, Rt, Ms | [356-373] ORF |
| 132 | CUGUUGGCUGUGAGGAAU | 462 | AUUCCUCACAGCCAACAG | 713 | Rh | [622-639] ORF |
| 133 | GCACAUCACUACCUGCAG | 463 | CUGCAGGUAGUGAUGUGC | 714 | | [542-559] ORF |
| 134 | UGCUGUGGCUGAUAGCCC | 464 | GGGCUAUCAGCCACAGCA | 715 | Rh | [232-249] ORF |
| 135 | CCACUCCCAUCUUUCUUC | 465 | GAAGAAAGAUGGGAGUGG | 716 | Rh | [864-881] 3′UTR |
| 136 | CUGGCUUCUGGCAUCCUG | 466 | CAGGAUGCCAGAAGCCAG | 717 | | [210-227] ORF |
| 137 | CUUCCACAGGUCCCACAA | 467 | UUGUGGGACCUGUGGAAG | 718 | Rh | [476-493] ORF |
| 138 | ACCAGCUCCUCCAAGGCU | 468 | AGCCUUGGAGGAGCUGGU | 719 | Rh | [706-723] ORF |
| 139 | CAAGAUGACCAAGAUGUA | 469 | UACAUCUUGGUCAUCUUG | 720 | Rh | [380-397] ORF |
| 140 | CCCGCCAUGGAGAGUGUC | 470 | GACACUCUCCAUGGCGGG | 721 | Rh | [450-467] ORF |
| 141 | CCCGGAGUGGAAGCUGAA | 471 | UUCAGCUUCCACUCCGGG | 722 | Rh | [822-839] 3′UTR |
| 142 | CGAGGAGUUUCUCAUUGC | 472 | GCAAUGAGAAACUCCUCG | 723 | Rh | [500-517] ORF |
| 143 | CACAUCACUACCUGCAGU | 473 | ACUGCAGGUAGUGAUGUG | 724 | | [543-560] ORF |
| 144 | CUCCAAGGCUCUGAAAAG | 474 | CUUUUCAGAGCCUUGGAG | 725 | Rh | [714-731] ORF |
| 145 | UGAGAUCAAGAUGACCAA | 475 | UUGGUCAUCUUGAUCUCA | 726 | Rh, Dg | [374-391] ORF |
| 146 | GCACUCAUUGCUUGUGGA | 476 | UCCACAAGCAAUGAGUGC | 727 | Rh, Rb | [685-702] ORF |
| 147 | CAUUGCUUGUGGACGGAC | 477 | GUCCGUCCACAAGCAAUG | 728 | Rh | [690-707] ORF |
| 148 | GGACCAGCUCCUCCAAGG | 478 | CCUUGGAGGAGCUGGUCC | 729 | Rh | [704-721] ORF |
| 149 | GCCUGCACAGUGUCCACC | 479 | GGUGGACACUGUGCAGGC | 730 | | [840-857] 3′UTR |
| 150 | UGUAUAAAGGGUUCCAAG | 480 | CUUGGAACCCUUUAUACA | 731 | | [394-411] ORF |
| 151 | CCUGCACAGUGUCCACCC | 481 | GGGUGGACACUGUGCAGG | 732 | | [841-858] 3′UTR |
| 152 | ACCUUAUACCAGCGUUAU | 482 | AUAACGCUGGUAUAAGGU | 733 | Rh, Rt, Ms | [357-374] ORF |
| 153 | CUUCCAGUCCCGUCACCU | 483 | AGGUGACGGGACUGGAAG | 734 | Rh | [734-751] ORF |
| 154 | CAGUGUCCACCCUGUUCC | 484 | GGAACAGGGUGGACACUG | 735 | | [847-864] 3′UTR |
| 155 | GGAGUGGAAGCUGAAGCC | 485 | GGCUUCAGCUUCCACUCC | 736 | Rh | [825-842] 3′UTR |
| 156 | CUUAUACCAGCGUUAUGA | 486 | UCAUAACGCUGGUAUAAG | 737 | Rh, Rt | [359-376] ORF |
| 157 | CCGCAGCGAGGAGUUUCU | 487 | AGAAACUCCUCGCUGCGG | 738 | Rh, Rb, Dg, Rt | [494-511] ORF |
| 158 | CAGUUUUGUGGCUCCCUG | 488 | CAGGGAGCCACAAAACUG | 739 | | [557-574] ORF |
| 159 | GUAUAAAGGGUUCCAAGC | 489 | GCUUGGAACCCUUUAUAC | 740 | | [395-412] ORF |
| 160 | AAGCCUGCACAGUGUCCA | 490 | UGGACACUGUGCAGGCUU | 741 | | [838-855] 3′UTR |
| 161 | AGGAUGGACUCUUGCACA | 491 | UGUGCAAGAGUCCAUCCU | 742 | | [529-546] ORF |
| 162 | AUGGAGAGUGUCUGCGGA | 492 | UCCGCAGACACUCUCCAU | 743 | Rh | [456-473] ORF |
| 163 | GCCUUCUGCAAUUCCGAC | 493 | GUCGGAAUUGCAGAAGGC | 744 | Rh | [291-308] ORF |
| 164 | CUUCUGCAAUUCCGACCU | 494 | AGGUCGGAAUUGCAGAAG | 745 | Rh | [293-310] ORF |
| 165 | AGACGGCCUUCUGCAAUU | 495 | AAUUGCAGAAGGCCGUCU | 746 | Rh | [286-303] ORF |
| 166 | GCAGGAUGGACUCUUGCA | 496 | UGCAAGAGUCCAUCCUGC | 747 | | [527-544] ORF |
| 167 | GCUUGUGGACGGACCAGC | 497 | GCUGGUCCGUCCACAAGC | 748 | Rh | [694-711] ORF |
| 168 | AGAAGUCAACCAGACCAC | 498 | GUGGUCUGGUUGACUUCU | 749 | Rh | [341-358] ORF |
| 169 | CUGUGCACCUGGCAGUCC | 499 | GGACUGCCAGGUGCACAG | 750 | Rh | [777-794] ORF |
| 170 | GAGGAGUUUCUCAUUGCU | 500 | AGCAAUGAGAAACUCCUC | 751 | Rh | [501-518] ORF |
| 171 | UGUUCCCACUCCCAUCUU | 501 | AAGAUGGGAGUGGGAACA | 752 | Rh | [859-876] 3′UTR |
| 172 | ACCGCAGCGAGGAGUUUC | 502 | GAAACUCCUCGCUGCGGU | 753 | Rh, Rb, Dg, Rt | [493-510] ORF |
| 173 | ACCAGAAGUCAACCAGAC | 503 | GUCUGGUUGACUUCUGGU | 754 | Rh | [338-355] ORF |
| 174 | GCAAUUCCGACCUCGUCA | 504 | UGACGAGGUCGGAAUUGC | 755 | Rh | [298-315] ORF |
| 175 | CUGCAAACUGCAGAGUGG | 505 | CCACUCUGCAGUUUGCAG | 756 | Rh | [668-685] ORF |
| 176 | GGAGCCAGGGCUGUGCAC | 506 | GUGCACAGCCCUGGCUCC | 757 | Rh | [767-784] ORF |
| 177 | CCUUCUGCAAUUCCGACC | 507 | GGUCGGAAUUGCAGAAGG | 758 | Rh | [292-309] ORF |
| 178 | CUUGCACAUCACUACCUG | 508 | CAGGUAGUGAUGUGCAAG | 759 | | [539-556] ORF |
| 179 | GGAAAACUGCAGGAUGGA | 509 | UCCAUCCUGCAGUUUUCC | 760 | | [519-536] ORF |
| 180 | AAUGCACAGUGUUUCCCU | 510 | AGGGAAACACUGUGCAUU | 761 | Rh | [637-654] ORF |
| 181 | CCCUGGAACAGCCUGAGC | 511 | GCUCAGGCUGUUCCAGGG | 762 | | [570-587] ORF |
| 182 | GGAUGCCGCUGACAUCCG | 512 | CGGAUGUCAGCGGCAUCC | 763 | Rh | [419-436] ORF |
| 183 | GGAUACUUCCACAGGUCC | 513 | GGACCUGUGGAAGUAUCC | 764 | Rh | [471-488] ORF |
| 184 | CACUCAUUGCUUGUGGAC | 514 | GUCCACAAGCAAUGAGUG | 765 | Rh, Rb | [686-703] ORF |
| 185 | GACACCAGAAGUCAACCA | 515 | UGGUUGACUUCUGGUGUC | 766 | Rh | [335-352] ORF |
| 186 | CUACACUGUUGGCUGUGA | 516 | UCACAGCCAACAGUGUAG | 767 | Rh | [617-634] ORF |
| 187 | ACCACCUUAUACCAGCGU | 517 | ACGCUGGUAUAAGGUGGU | 768 | Rh, Rt, Ms | [354-371] ORF |
| 188 | AGAGUGGCACUCAUUGCU | 518 | AGCAAUGAGUGCCACUCU | 769 | Rh | [679-696] ORF |
| 189 | GCAAACUGCAGAGUGGCA | 519 | UGCCACUCUGCAGUUUGC | 770 | Rh | [670-687] ORF |
| 190 | GCCGCUGACAUCCGGUUC | 520 | GAACCGGAUGUCAGCGGC | 771 | Rh | [423-440] ORF |
| 191 | UGUUUCCCUGUUUAUCCA | 521 | UGGAUAAACAGGGAAACA | 772 | Rh | [646-663] ORF |
| 192 | AAGUCAACCAGACCACCU | 522 | AGGUGGUCUGGUUGACUU | 773 | Rh | [343-360] ORF |
| 193 | CCACAACCGCAGCGAGGA | 523 | UCCUCGCUGCGGUUGUGG | 774 | Rh | [488-505] ORF |
| 194 | GCCUGAGCUUAGCUCAGC | 524 | GCUGAGCUAAGCUCAGGC | 775 | | [580-597] ORF |
| 195 | GUCAUCAGGGCCAAGUUC | 525 | GAACUUGGCCCUGAUGAC | 776 | Rh, Dg | [312-329] ORF |
| 196 | AACCAGACCACCUUAUAC | 526 | GUAUAAGGUGGUCUGGUU | 777 | Rh | [348-365] ORF |
| 197 | CUCCCUGGAACAGCCUGA | 527 | UCAGGCUGUUCCAGGGAG | 778 | | [568-585] ORF |
| 198 | CCAAGGCUCUGAAAAGGG | 528 | CCCUUUUCAGAGCCUUGG | 779 | Rh | [716-733] ORF |
| 199 | CUCAUUGCUGGAAAACUG | 529 | CAGUUUUCCAGCAAUGAG | 780 | Rh | [510-527] ORF |
| 200 | GUGUCCACCCUGUUCCCA | 530 | UGGGAACAGGGUGGACAC | 781 | | [849-866] 3′UTR |
| 201 | CCUGUUCCCACUCCCAUC | 531 | GAUGGGAGUGGGAACAGG | 782 | Rh | [857-874] 3′UTR |
| 202 | CACCUUGCCUGCCUGCCU | 532 | AGGCAGGCAGGCAAGGUG | 783 | Rh | [747-764] ORF |
| 203 | UCACCAAGACCUACACUG | 533 | CAGUGUAGGUCUUGGUGA | 784 | Rh | [607-624] ORF |
| 204 | GAAUGCACAGUGUUUCCC | 534 | GGGAAACACUGUGCAUUC | 785 | Rh | [636-653] ORF |
| 205 | AUGGACUCUUGCACAUCA | 535 | UGAUGUGCAAGAGUCCAU | 786 | | [532-549] ORF |
| 206 | UGUGAGGAAUGCACAGUG | 536 | CACUGUGCAUUCCUCACA | 787 | Rh | [630-647] ORF |
| 207 | GAGCCAGGGCUGUGCACC | 537 | GGUGCACAGCCCUGGCUC | 788 | Rh | [768-785] ORF |
| 208 | UGCGGUCCCAGAUAGCCU | 538 | AGGCUAUCUGGGACCGCA | 789 | | [796-813] ORF |
| 209 | CUGUUCCCACUCCCAUCU | 539 | AGAUGGGAGUGGGAACAG | 790 | Rh | [858-875] 3′UTR |
| 210 | UGGCUUCUGGCAUCCUGU | 540 | ACAGGAUGCCAGAAGCCA | 791 | | [211-228] ORF |
| 211 | CGGAUACUUCCACAGGUC | 541 | GACCUGUGGAAGUAUCCG | 792 | Rh | [470-487] ORF |
| 212 | CACAGUGUCCACCCUGUU | 542 | AACAGGGUGGACACUGUG | 793 | | [845-862] 3′UTR |
| 213 | GGAAUGCACAGUGUUUCC | 543 | GGAAACACUGUGCAUUCC | 794 | Rh | [635-652] ORF |
| 214 | CCAGGGCUGUGCACCUGG | 544 | CCAGGUGCACAGCCCUGG | 795 | Rh | [771-788] ORF |
| 215 | CCCUGCGGUCCCAGAUAG | 545 | CUAUCUGGGACCGCAGGG | 796 | | [793-810] ORF |
| 216 | GCCUGCACCUGUGUCCCA | 546 | UGGGACACAGGUGCAGGC | 797 | Rb | [258-275] ORF |
| 217 | CAGAGUGGCACUCAUUGC | 547 | GCAAUGAGUGCCACUCUG | 798 | Rh | [678-695] ORF |
| 218 | UGCACAUCACUACCUGCA | 548 | UGCAGGUAGUGAUGUGCA | 799 | | [541-558] ORF |
| 219 | GAAGUCAACCAGACCACC | 549 | GGUGGUCUGGUUGACUUC | 800 | Rh | [342-359] ORF |
| 220 | UCCCUGCGGUCCCAGAUA | 550 | UAUCUGGGACCGCAGGGA | 801 | | [792-809] ORF |
| 221 | AGUGGCACUCAUUGCUUG | 551 | CAAGCAAUGAGUGCCACU | 802 | Rh | [681-698] ORF |
| 222 | GUGGCACUCAUUGCUUGU | 552 | ACAAGCAAUGAGUGCCAC | 803 | Rh | [682-699] ORF |
| 223 | CUGAAUCCUGCCCGGAGU | 553 | ACUCCGGGCAGGAUUCAG | 804 | | [812-829] ORF + 3′UTR |
| 224 | CCUGCACCUGUGUCCCAC | 554 | GUGGGACACAGGUGCAGG | 805 | Rb | [259-276] ORF |
| 225 | GCCUGCCUCGGGAGCCAG | 555 | CUGGCUCCCGAGGCAGGC | 806 | Rh | [757-774] ORF |
| 226 | GGGAUGCCGCUGACAUCC | 556 | GGAUGUCAGCGGCAUCCC | 807 | Rh | [418-435] ORF |
| 227 | GCACCUGGCAGUCCCUGC | 557 | GCAGGGACUGCCAGGUGC | 808 | Rh, Dg | [781-798] ORF |
| 228 | UCCUGUUGUUGCUGUGGC | 558 | GCCACAGCAACAACAGGA | 809 | Rh | [223-240] ORF |
| 229 | UGCGGAUACUUCCACAGG | 559 | CCUGUGGAAGUAUCCGCA | 810 | Rh | [468-485] ORF |
| 230 | GACCAAGAUGUAUAAAGG | 560 | CCUUUAUACAUCUUGGUC | 811 | Rh | [386-403] ORF |
| 231 | ACUGUUGGCUGUGAGGAA | 561 | UUCCUCACAGCCAACAGU | 812 | Rh | [621-638] ORF |
| 232 | CAUUGCUGGAAAACUGCA | 562 | UGCAGUUUUCCAGCAAUG | 813 | Rh | [512-529] ORF |
| 233 | UGAAAAGGGCUUCCAGUC | 563 | GACUGGAAGCCCUUUUCA | 814 | Rh | [725-742] ORF |
| 234 | CGUCAUCAGGGCCAAGUU | 564 | AACUUGGCCCUGAUGACG | 815 | Rh, Rb, Dg | [311-328] ORF |
| 235 | ACAACCGCAGCGAGGAGU | 565 | ACUCCUCGCUGCGGUUGU | 816 | Rh | [490-507] ORF |
| 236 | UGUCCACCCUGUUCCCAC | 566 | GUGGGAACAGGGUGGACA | 817 | Rh | [850-867] 3′UTR |
| 237 | CCUGGCAGUCCCUGCGGU | 567 | ACCGCAGGGACUGCCAGG | 818 | | [784-801] ORF |
| 238 | UGAAGCCUGCACAGUGUC | 568 | GACACUGUGCAGGCUUCA | 819 | | [836-853] 3′UTR |
| 239 | UCCCAGAUAGCCUGAAUC | 569 | GAUUCAGGCUAUCUGGGA | 820 | | [801-818] ORF + 3′UTR |
| 240 | AGCCUGAGCUUAGCUCAG | 570 | CUGAGCUAAGCUCAGGCU | 821 | | [579-596] ORF |
| 241 | CACUACCUGCAGUUUUGU | 571 | ACAAAACUGCAGGUAGUG | 822 | | [548-565] ORF |
| 242 | CUGCACAGUGUCCACCCU | 572 | AGGGUGGACACUGUGCAG | 823 | | [842-859] 3′UTR |
| 243 | CUCGGGAGCCAGGGCUGU | 573 | ACAGCCCUGGCUCCCGAG | 824 | Rh | [763-780] ORF |
| 244 | AGCCAGGGCUGUGCACCU | 574 | AGGUGCACAGCCCUGGCU | 825 | Rh | [769-786] ORF |
| 245 | GCCAUGGAGAGUGUCUGC | 575 | GCAGACACUCUCCAUGGC | 826 | Rh | [453-470] ORF |
| 246 | AGGGCUGUGCACCUGGCA | 576 | UGCCAGGUGCACAGCCCU | 827 | Rh | [773-790] ORF |
| 247 | GAGCUUAGCUCAGCGCCG | 577 | CGGCGCUGAGCUAAGCUC | 828 | Rh | [584-601] ORF |
| 248 | AGGCUCUGAAAAGGGCUU | 578 | AAGCCCUUUUCAGAGCCU | 829 | Rh | [719-736] ORF |
| 249 | ACAUCACUACCUGCAGUU | 579 | AACUGCAGGUAGUGAUGU | 830 | | [544-561] ORF |
| 250 | AACCGCAGCGAGGAGUUU | 580 | AAACUCCUCGCUGCGGUU | 831 | Rh, Rb, Dg, Rt | [492-509] ORF |
| 251 | CAGCUCCUCCAAGGCUCU | 581 | AGAGCCUUGGAGGAGCUG | 832 | Rh | [708-725] ORF |

TABLE A6
18-mer Cross-Species siTIMP1

| | | SEQ | | SEQ | | |
|---|---|---|---|---|---|---|
| | | ID | | ID | | human-73858576 |
| No. | Sense (5′>3′) | NO. | Antisense (5′>3′) | NO. | Other Sp | ORF: 193-816 |
| 1 | ACCUGGCAGUCCCUGCGG | 833 | CCGCAGGGACUGCCAGGU | 839 | Rh, Rb, Dg | [783-800] ORF |
| 2 | CAACCGCAGCGAGGAGUU | 834 | AACUCCUCGCUGCGGUUG | 840 | Rh, Rb, Dg, Rt | [491-508] ORF |
| 3 | AUGCACAGUGUUUCCCUG | 835 | CAGGGAAACACUGUGCAU | 841 | Rh, Rt, Ms | [638-655] ORF |
| 4 | GACCACCUUAUACCAGCG | 836 | CGCUGGUAUAAGGUGGUC | 842 | Rh, Rt, Ms | [353-370] ORF |
| 5 | UUAUGAGAUCAAGAUGAC | 837 | GUCAUCUUGAUCUCAUAA | 843 | Rh, Dg, Rt | [371-388] ORF |
| 6 | UAUACCAGCGUUAUGAGA | 838 | UCUCAUAACGCUGGUAUA | 844 | Rh, Rt | [361-378] ORF |

TABLE A7
Preferred 18 + A-mer siTIMP1

| | | | | | | |
|---|---|---|---|---|---|---|
| | | SEQ | | SEQ | | |
| | | ID | | ID | | human-73858576 |
| siTIMP1_pNo. | Sense (5′>3′) | NO. | Antisense (5′>3′) | NO. | length | ORF: 193-816 |

| | | | | | | |
|---|---|---|---|---|---|---|
| siTIMP1_p1 | GCGUUAUGAGAUCAAGAUA | 845 | UAUCUUGAUCUCAUAACGC | 926 | 18 + 1 | [368-385] ORF |
| siTIMP1_p3 | CAGACCACCUUAUACCAGA | 846 | UCUGGUAUAAGGUGGUCUG | 927 | 18 + 1 | [351-368] ORF |
| siTIMP1_p4 | GCACAGUGUUUCCCUGUUA | 847 | UAACAGGGAAACACUGUGC | 928 | 18 + 1 | [640-657] ORF |
| siTIMP1_p5 | CAGCGAGGAGUUUCUCAUA | 848 | UAUGAGAAACUCCUCGCUG | 929 | 18 + 1 | [497-514] ORF |
| siTIMP1_p7 | AUACCAGCGUUAUGAGAUA | 849 | UAUCUCAUAACGCUGGUAU | 930 | 18 + 1 | [362-379] ORF |
| siTIMP1_p8 | UGCACAGUGUUUCCCUGUA | 850 | UACAGGGAAACACUGUGCA | 931 | 18 + 1 | [639-656] ORF |
| siTIMP1_p9 | CACCUUAUACCAGCGUUAA | 851 | UUAACGCUGGUAUAAGGUG | 932 | 18 + 1 | [356-373] ORF |
| siTIMP1_p10 | ACCUUAUACCAGCGUUAUA | 852 | UAUAACGCUGGUAUAAGGU | 933 | 18 + 1 | [357-374] ORF |
| siTIMP1_p11 | CUUAUACCAGCGUUAUGAA | 853 | UUCAUAACGCUGGUAUAAG | 934 | 18 + 1 | [359-376] ORF |
| siTIMP1_p12 | CCGCAGCGAGGAGUUUCUA | 854 | UAGAAACUCCUCGCUGCGG | 935 | 18 + 1 | [494-511] ORF |
| siTIMP1_p13 | ACCGCAGCGAGGAGUUUCA | 855 | UGAAACUCCUCGCUGCGGU | 936 | 18 + 1 | [493-510] ORF |
| siTIMP1_p15 | ACCACCUUAUACCAGCGUA | 856 | UACGCUGGUAUAAGGUGGU | 937 | 18 + 1 | [354-371] ORF |
| siTIMP1_p18 | AACCGCAGCGAGGAGUUUA | 857 | UAAACUCCUCGCUGCGGUU | 938 | 18 + 1 | [492-509] ORF |
| siTIMP1_p22 | UAUACCAGCGUUAUGAGAA | 858 | UUCUCAUAACGCUGGUAUA | 939 | 18 + 1 | [361-378] ORF |
| siTIMP1_p25 | AGAUCAAGAUGACCAAGAA | 859 | UUCUUGGUCAUCUUGAUCU | 940 | 18 + 1 | [376-393] ORF |
| siTIMP1_p26 | CCUGCAAACUGCAGAGUGA | 860 | UCACUCUGCAGUUUGCAGG | 941 | 18 + 1 | [667-684] ORF |
| siTIMP1_p28 | CCCUGCAAACUGCAGAGUA | 861 | UACUCUGCAGUUUGCAGGG | 942 | 18 + 1 | [666-683] ORF |
| siTIMP1_p30 | GAUCAAGAUGACCAAGAUA | 862 | UAUCUUGGUCAUCUUGAUC | 943 | 18 + 1 | [377-394] ORF |
| siTIMP1_p32 | GUCAUCAGGGCCAAGUUCA | 863 | UGAACUUGGCCCUGAUGAC | 944 | 18 + 1 | [312-329] ORF |
| siTIMP1_p34 | CCUGCACCUGUGUCCCACA | 864 | UGUGGGACACAGGUGCAGG | 945 | 18 + 1 | [259-276] ORF |
| siTIMP1_p35 | GGGCUUCACCAAGACCUAA | 865 | UUAGGUCUUGGUGAAGCCC | 946 | 18 + 1 | [602-619] ORF |
| siTIMP1_p36 | CGUCAUCAGGGCCAAGUUA | 866 | UAACUUGGCCCUGAUGACG | 947 | 18 + 1 | [311-328] ORF |
| siTIMP1_p37 | CACUCAUUGCUUGUGGACA | 867 | UGUCCACAAGCAAUGAGUG | 948 | 18 + 1 | [686-703] ORF |
| siTIMP1_p39 | CAGUGUUUCCCUGUUUAUA | 868 | UAUAAACAGGGAAACACUG | 949 | 18 + 1 | [643-660] ORF |
| siTIMP1_p40 | ACAGUGUUUCCCUGUUUAA | 869 | UUAAACAGGGAAACACUGU | 950 | 18 + 1 | [642-659] ORF |
| siTIMP1_p41 | AGUGUUUCCCUGUUUAUCA | 870 | UGAUAAACAGGGAAACACU | 951 | 18 + 1 | [644-661] ORF |
| siTIMP1_p44 | CAUCUUUCUUCCGGACAAA | 871 | UUUGUCCGGAAGAAAGAUG | 952 | 18 + 1 | [871-888] 3′UTR |
| siTIMP1_p46 | CCAGAUAGCCUGAAUCCUA | 872 | UAGGAUUCAGGCUAUCUGG | 953 | 18 + 1 | [803-820] |
| | | | | | | ORF + 3′UTR |
| siTIMP1_p47 | GGUCCCAGAUAGCCUGAAA | 873 | UUUCAGGCUAUCUGGGACC | 954 | 18 + 1 | [799-816] ORF |
| siTIMP1_p48 | GGAGAGUGUCUGCGGAUAA | 874 | UUAUCCGCAGACACUCUCC | 955 | 18 + 1 | [458-475] ORF |
| siTIMP1_p50 | CCGCCAUGGAGAGUGUCUA | 875 | UAGACACUCUCCAUGGCGG | 956 | 18 + 1 | [458-475] ORF |
| siTIMP1_p51 | GAGUGUCUGCGGAUACUUA | 876 | UAAGUAUCCGCAGACACUC | 957 | 18 + 1 | [458-475] ORF |
| siTIMP1_p52 | GAGUGGCACUCAUUGCUUA | 877 | UAAGCAAUGAGUGCCACUC | 958 | 18 + 1 | [680-697] ORF |
| siTIMP1_p53 | GAGUGGAAGCUGAAGCCUA | 878 | UAGGCUUCAGCUUCCACUC | 959 | 18 + 1 | [826-843] 3′UTR |
| siTIMP1_p54 | CCCUGUUCCCACUCCCAUA | 879 | UAUGGGAGUGGGAACAGGG | 960 | 18 + 1 | [856-873] 3′UTR |
| siTIMP1_p55 | GCGGAUACUUCCACAGGUA | 880 | UACCUGUGGAAGUAUCCGC | 961 | 18 + 1 | [469-486] ORF |
| siTIMP1_p56 | GAGAGUGUCUGCGGAUACA | 881 | UGUAUCCGCAGACACUCUC | 962 | 18 + 1 | [459-476] ORF |
| siTIMP1_p57 | GGAACAGCCUGAGCUUAGA | 882 | UCUAAGCUCAGGCUGUUCC | 963 | 18 + 1 | [574-591] ORF |
| siTIMP1_p58 | CAACCAGACCACCUUAUAA | 883 | UUAUAAGGUGGUCUGGUUG | 964 | 18 + 1 | [347-364] ORF |
| siTIMP1_p59 | GAGGAAUGCACAGUGUUUA | 884 | UAAACACUGUGCAUUCCUC | 965 | 18 + 1 | [633-650] ORF |
| siTIMP1_p61 | CCAAGAUGUAUAAAGGGUA | 885 | UACCCUUUAUACAUCUUGG | 966 | 18 + 1 | [388-405] ORF |
| siTIMP1_p62 | CACCAGAAGUCAACCAGAA | 886 | UUCUGGUUGACUUCUGGUG | 967 | 18 + 1 | [337-354] ORF |
| siTIMP1_p63 | CAGAAGUCAACCAGACCAA | 887 | UUGGUCUGGUUGACUUCUG | 968 | 18 + 1 | [340-357] ORF |
| siTIMP1_p64 | CCCACUCCCAUCUUUCUUA | 888 | UAAGAAAGAUGGGAGUGGG | 969 | 18 + 1 | [863-880] 3′UTR |
| siTIMP1_p65 | GCGAGGAGUUUCUCAUUGA | 889 | UCAAUGAGAAACUCCUCGC | 970 | 18 + 1 | [499-516] ORF |
| siTIMP1_p66 | CUGCAGAGUGGCACUCAUA | 890 | UAUGAGUGCCACUCUGCAG | 971 | 18 + 1 | [675-692] ORF |
| siTIMP1_p67 | GAAGCUGAAGCCUGCACAA | 891 | UUGUGCAGGCUUCAGCUUC | 972 | 18 + 1 | [831-848] 3′UTR |
| siTIMP1_p68 | CCUGGAACAGCCUGAGCUA | 892 | UAGCUCAGGCUGUUCCAGG | 973 | 18 + 1 | [571-588] ORF |
| siTIMP1_p69 | GCAUCCUGUUGUUGCUGUA | 893 | UACAGCAACAACAGGAUGC | 974 | 18 + 1 | [220-237] ORF |
| siTIMP1_p70 | GUCCCAGAUAGCCUGAAUA | 894 | UAUUCAGGCUAUCUGGGAC | 975 | 18 + 1 | [800-817] |
| | | | | | | ORF + 3′UTR |
| siTIMP1_p72 | GGCUGUGAGGAAUGCACAA | 895 | UUGUGCAUUCCUCACAGCC | 976 | 18 + 1 | [627-644] ORF |
| siTIMP1_p74 | GGCCUUCUGCAAUUCCGAA | 896 | UUCGGAAUUGCAGAAGGCC | 977 | 18 + 1 | [290-307] ORF |
| siTIMP1_p75 | GCAGAGUGGCACUCAUUGA | 897 | UCAAUGAGUGCCACUCUGC | 978 | 18 + 1 | [677-694] ORF |
| siTIMP1_p76 | CAGAUAGCCUGAAUCCUGA | 898 | UCAGGAUUCAGGCUAUCUG | 979 | 18 + 1 | [804-821] |
| | | | | | | ORF + 3′UTR |
| siTIMP1_p80 | CCGGAGUGGAAGCUGAAGA | 899 | UCUUCAGCUUCCACUCCGG | 980 | 18 + 1 | [823-840] 3′UTR |
| siTIMP1_p81 | GGCUGUGCACCUGGCAGUA | 900 | UACUGCCAGGUGCACAGCC | 981 | 18 + 1 | [775-792] ORF |
| siTIMP1_p82 | GUCAACCAGACCACCUUAA | 901 | UUAAGGUGGUCUGGUUGAC | 982 | 18 + 1 | [345-362] ORF |
| siTIMP1_p83 | CCAUGGAGAGUGUCUGCGA | 902 | UCGCAGACACUCUCCAUGG | 983 | 18 + 1 | [454-471] ORF |
| siTIMP1_p84 | CUGGCAUCCUGUUGUUGCA | 903 | UGCAACAACAGGAUGCCAG | 984 | 18 + 1 | [217-234] ORF |
| siTIMP1_p86 | ACUGCAGAGUGGCACUCAA | 904 | UUGAGUGCCACUCUGCAGU | 985 | 18 + 1 | [674-691] ORF |
| siTIMP1_p87 | CGGAGUGGAAGCUGAAGCA | 905 | UGCUUCAGCUUCCACUCCG | 986 | 18 + 1 | [824-841] 3′UTR |
| siTIMP1_p88 | CCAGACCACCUUAUACCAA | 906 | UUGGUAUAAGGUGGUCUGG | 987 | 18 + 1 | [350-367] ORF |
| siTIMP1_p90 | GCUGGAAAACUGCAGGAUA | 907 | UAUCCUGCAGUUUUCCAGC | 988 | 18 + 1 | [516-533] ORF |
| siTIMP1_p92 | CCUGAAUCCUGCCCGGAGA | 908 | UCUCCGGGCAGGAUUCAGG | 989 | 18 + 1 | [811-828] |
| | | | | | | ORF + 3′UTR |
| siTIMP1_p93 | CUGAAGCCUGCACAGUGUA | 909 | UACACUGUGCAGGCUUCAG | 990 | 18 + 1 | [835-852] 3′UTR |
| siTIMP1_p94 | CUGGAAAACUGCAGGAUGA | 910 | UCAUCCUGCAGUUUUCCAG | 991 | 18 + 1 | [517-534] ORF |
| siTIMP1_p95 | UCUCAUUGCUGGAAAACUA | 911 | UAGUUUUCCAGCAAUGAGA | 992 | 18 + 1 | [509-526] ORF |
| siTIMP1_p97 | AGACCUACACUGUUGGCUA | 912 | UAGCCAACAGUGUAGGUCU | 993 | 18 + 1 | [613-630] ORF |
| siTIMP1_p100 | GGGACACCAGAAGUCAACA | 913 | UGUUGACUUCUGGUGUCCC | 994 | 18 + 1 | [333-350] ORF |
| siTIMP1_p101 | GGCUCCCUGGAACAGCCUA | 914 | UAGGCUGUUCCAGGGAGCC | 995 | 18 + 1 | [566-583] ORF |
| siTIMP1_p102 | GUUCCCACUCCCAUCUUUA | 915 | UAAAGAUGGGAGUGGGAAC | 996 | 18 + 1 | [860-877] 3′UTR |
| siTIMP1_p103 | GGCUUCUGGCAUCCUGUUA | 916 | UAACAGGAUGCCAGAAGCC | 997 | 18 + 1 | [212-229] ORF |
| siTIMP1_p104 | CUUCUGGCAUCCUGUUGUA | 917 | UACAACAGGAUGCCAGAAG | 998 | 18 + 1 | [214-231] ORF |
| siTIMP1_p105 | AGAGUGUCUGCGGAUACUA | 918 | UAGUAUCCGCAGACACUCU | 999 | 18 + 1 | [460-477] ORF |
| siTIMP1_p106 | CACCAAGACCUACACUGUA | 919 | UACAGUGUAGGUCUUGGUG | 1000 | 18 + 1 | [608-625] ORF |
| siTIMP1_p109 | GGGAGCCAGGGCUGUGCAA | 920 | UUGCACAGCCCUGGCUCCC | 1001 | 18 + 1 | [766-783] ORF |
| siTIMP1_p110 | UGCAGAGUGGCACUCAUUA | 921 | UAAUGAGUGCCACUCUGCA | 1002 | 18 + 1 | [676-693] ORF |
| siTIMP1_p111 | GUGAGGAAUGCACAGUGUA | 922 | UACACUGUGCAUUCCUCAC | 1003 | 18 + 1 | [631-648] ORF |
| siTIMP1_p112 | AGCGAGGAGUUUCUCAUUA | 923 | UAAUGAGAAACUCCUCGCU | 1004 | 18 + 1 | [498-515] ORF |
| siTIMP1_p113 | GGGCUGUGCACCUGGCAGA | 924 | UCUGCCAGGUGCACAGCCC | 1005 | 18 + 1 | [774-791] ORF |
| siTIMP1_p114 | UGUUGUUGCUGUGGCUGAA | 925 | UUCAGCCACAGCAACAACA | 1006 | 18 + 1 | [226-243] ORF |

TABLE A8
18 + 1-mer siTIMP1 with lowest predicted Off Target (OT) effect

| | | | | | | |
|---|---|---|---|---|---|---|
| | | | SEQ | | SEQ | |
| | | | ID | | ID | No. in Table |
| Cross species | Ranking | Sense (5′ > 3′) | NO. | Antisense (5′ > 3′) | NO. | A7 |

| | | | | | | |
|---|---|---|---|---|---|---|
| H/Rt | 2 | GCGUUAUGAGAUCAAGAUA | 845 | UAUCUUGAUCUCAUAACGC | 926 | siTIMP1_p1 |
| H/Rt | 3 | GCACAGUGUUUCCCUGUUA | 847 | UAACAGGGAAACACUGUGC | 928 | siTIMP1_p4 |
| H/Rt | 3 | CAGCGAGGAGUUUCUCAUA | 848 | UAUGAGAAACUCCUCGCUG | 929 | siTIMP1_p5 |
| H/Rt | 2 | AUACCAGCGUUAUGAGAUA | 849 | UAUCUCAUAACGCUGGUAU | 930 | siTIMP1_p7 |
| H/Rt | 4 | UGCACAGUGUUUCCCUGUA | 850 | UACAGGGAAACACUGUGCA | 931 | siTIMP1_p8 |
| H/Rt | 1 | CACCUUAUACCAGCGUUAA | 851 | UUAACGCUGGUAUAAGGUG | 932 | siTIMP1_p9 |
| H/Rt | 1 | ACCUUAUACCAGCGUUAUA | 852 | UAUAACGCUGGUAUAAGGU | 933 | siTIMP1_p10 |
| H/Rt | 1 | CUUAUACCAGCGUUAUGAA | 853 | UUCAUAACGCUGGUAUAAG | 934 | siTIMP1_p11 |
| H/Rt | 2 | CCGCAGCGAGGAGUUUCUA | 854 | UAGAAACUCCUCGCUGCGG | 935 | siTIMP1_p12 |
| H/Rt | 3 | ACCGCAGCGAGGAGUUUCA | 855 | UGAAACUCCUCGCUGCGGU | 936 | siTIMP1_p13 |
| H/Rt | 2 | ACCACCUUAUACCAGCGUA | 856 | UACGCUGGUAUAAGGUGGU | 937 | siTIMP1_p15 |
| H/Rt | 2 | AACCGCAGCGAGGAGUUUA | 857 | UAAACUCCUCGCUGCGGUU | 938 | siTIMP1_p18 |
| H/Rt | 2 | UAUACCAGCGUUAUGAGAA | 858 | UUCUCAUAACGCUGGUAUA | 939 | siTIMP1_p22 |
| Other (w/o Rt) | 4 | CCUGCAAACUGCAGAGUGA | 860 | UCACUCUGCAGUUUGCAGG | 941 | siTIMP1_p26 |
| Other (w/o Rt) | 4 | CGUCAUCAGGGCCAAGUUA | 866 | UAACUUGGCCCUGAUGACG | 947 | siTIMP1_p36 |
| H/Rt (Rt with | 1 | CACUCAUUGCUUGUGGACA | 867 | UGUCCACAAGCAAUGAGUG | 948 | siTIMP1_p37 |
| 1MM) | | | | | | |
| Other (w/o Rt) | 3 | CAGUGUUUCCCUGUUUAUA | 868 | UAUAAACAGGGAAACACUG | 949 | siTIMP1_p39 |
| Other (w/o Rt) | 3 | ACAGUGUUUCCCUGUUUAA | 869 | UUAAACAGGGAAACACUGU | 950 | siTIMP1_p40 |
| Other (w/o Rt) | 2 | AGUGUUUCCCUGUUUAUCA | 870 | UGAUAAACAGGGAAACACU | 951 | siTIMP1_p41 |
| H +/− Rh | 2 | CAUCUUUCUUCCGGACAAA | 871 | UUUGUCCGGAAGAAAGAUG | 952 | siTIMP1_p44 |
| H +/− Rh | 3 | GGUCCCAGAUAGCCUGAAA | 873 | UUUCAGGCUAUCUGGGACC | 954 | siTIMP1_p47 |
| H +/− Rh | 2 | GGAGAGUGUCUGCGGAUAA | 874 | UUAUCCGCAGACACUCUCC | 955 | siTIMP1_p48 |
| H +/− Rh | 3 | CCGCCAUGGAGAGUGUCUA | 875 | UAGACACUCUCCAUGGCGG | 956 | siTIMP1_p50 |
| H +/− Rh | 3 | GAGUGUCUGCGGAUACUUA | 876 | UAAGUAUCCGCAGACACUC | 957 | siTIMP1_p51 |
| H +/− Rh | 3 | GAGUGGCACUCAUUGCUUA | 877 | UAAGCAAUGAGUGCCACUC | 958 | siTIMP1_p52 |
| H +/− Rh | 2 | GCGGAUACUUCCACAGGUA | 880 | UACCUGUGGAAGUAUCCGC | 961 | siTIMP1_p55 |
| H +/− Rh | 2 | GAGAGUGUCUGCGGAUACA | 881 | UGUAUCCGCAGACACUCUC | 962 | siTIMP1_p56 |
| H +/− Rh | 3 | CAACCAGACCACCUUAUAA | 883 | UUAUAAGGUGGUCUGGUUG | 964 | siTIMP1_p58 |
| H +/− Rh | 3 | CCAAGAUGUAUAAAGGGUA | 885 | UACCCUUUAUACAUCUUGG | 966 | siTIMP1_p61 |
| H +/− Rh | 4 | CCCACUCCCAUCUUUCUUA | 888 | UAAGAAAGAUGGGAGUGGG | 969 | siTIMP1_p64 |
| H +/− Rh | 3 | CUGCAGAGUGGCACUCAUA | 890 | UAUGAGUGCCACUCUGCAG | 971 | siTIMP1_p66 |
| H +/− Rh | 4 | CCUGGAACAGCCUGAGCUA | 892 | UAGCUCAGGCUGUUCCAGG | 973 | siTIMP1_p68 |
| H +/− Rh | 3 | GUCCCAGAUAGCCUGAAUA | 894 | UAUUCAGGCUAUCUGGGAC | 975 | siTIMP1_p70 |
| H +/− Rh | 4 | GCAGAGUGGCACUCAUUGA | 897 | UCAAUGAGUGCCACUCUGC | 978 | siTIMP1_p75 |
| H +/− Rh | 3 | CCAUGGAGAGUGUCUGCGA | 903 | UCGCAGACACUCUCCAUGG | 983 | siTIMP1_p83 |
| H +/− Rh | 4 | ACUGCAGAGUGGCACUCAA | 904 | UUGAGUGCCACUCUGCAGU | 985 | siTIMP1_p86 |
| H +/− Rh | 2 | CCAGACCACCUUAUACCAA | 906 | UUGGUAUAAGGUGGUCUGG | 987 | siTIMP1_p88 |
| H +/− Rh | 4 | CCUGAAUCCUGCCCGGAGA | 908 | UCUCCGGGCAGGAUUCAGG | 989 | siTIMP1_p92 |
| H +/− Rh | 3 | CUGAAGCCUGCACAGUGUA | 909 | UACACUGUGCAGGCUUCAG | 990 | siTIMP1_p93 |
| H +/− Rh | 4 | UCUCAUUGCUGGAAAACUA | 911 | UAGUUUUCCAGCAAUGAGA | 992 | siTIMP1_p95 |
| H +/− Rh | 2 | AGACCUACACUGUUGGCUA | 912 | UAGCCAACAGUGUAGGUCU | 993 | siTIMP1_p97 |
| H +/− Rh | 4 | GUUCCCACUCCCAUCUUUA | 915 | UAAAGAUGGGAGUGGGAAC | 996 | siTIMP1_p102 |
| H +/− Rh | 4 | CUUCUGGCAUCCUGUUGUA | 917 | UACAACAGGAUGCCAGAAG | 998 | siTIMP1_p104 |
| H +/− Rh | 2 | AGAGUGUCUGCGGAUACUA | 918 | UAGUAUCCGCAGACACUCU | 999 | siTIMP1_p105 |
| H +/− Rh | 3 | CACCAAGACCUACACUGUA | 919 | UACAGUGUAGGUCUUGGUG | 1000 | siTIMP1_p106 |
| H +/− Rh | 2 | UGCAGAGUGGCACUCAUUA | 921 | UAAUGAGUGCCACUCUGCA | 1002 | siTIMP1_p110 |
| H +/− Rh | 4 | AGCGAGGAGUUUCUCAUUA | 923 | UAAUGAGAAACUCCUCGCU | 1004 | siTIMP1_p112 |

### TIMP2—TIMP Metallopeptidase Inhibitor 2

TABLE B1
siTIMP2 19-mers

| | | | | | |
|---|---|---|---|---|---|
| | SEQ | | SEQ | | |
| | ID | | ID | | human-73858577 |
| Sense (5′ > 3′) | NO: | Antisense (5′ > 3′) | NO: | Other Sp | ORF: 303-965 |

| | | | | | |
|---|---|---|---|---|---|
| GGAAGAACUUUCUCGGUAA | 1007 | UUACCGAGAAAGUUCUUCC | 1622 | Rh | [2332-2350] 3′UTR |
| GGUUCUCCAGUUCAAAUUA | 1008 | UAAUUUGAACUGGAGAACC | 1623 | | [3062-3080] 3′UTR |
| CUGUGUUUAUGCUGGAAUA | 1009 | UAUUCCAGCAUAAACACAG | 1624 | | [3495-3513] 3′UTR |
| CCUGUAUGGUGAUAUCAUA | 1010 | UAUGAUAUCACCAUACAGG | 1625 | | [2789-2807] 3′UTR |
| GGCACAUUAUGUAAACAUA | 1011 | UAUGUUUACAUAAUGUGCC | 1626 | Rh | [2412-2430] 3′UTR |
| GGUGAAUUCUCAGAUGAUA | 1012 | UAUCAUCUGAGAAUUCACC | 1627 | | [2165-2183] 3′UTR |
| CCAUGUGAUUUCAGUAUAU | 1013 | AUAUACUGAAAUCACAUGG | 1628 | Rh | [2718-2736] 3′UTR |
| CUCUGAGCCUUGUAGAAAU | 1014 | AUUUCUACAAGGCUCAGAG | 1629 | Rh | [1606-1624] 3′UTR |
| GGCUGCGAGUGCAAGAUCA | 1015 | UGAUCUUGCACUCGCAGCC | 1630 | Ck, Rb, Rt | [752-770] ORF |
| AGAGGAAGCCGCUCAAAUA | 1016 | UAUUUGAGCGGCUUCCUCU | 1631 | | [3214-3232] 3′UTR |
| CUUUGGUUCUCCAGUUCAA | 1017 | UUGAACUGGAGAACCAAAG | 1632 | | [3058-3076] 3′UTR |
| CAGUAUGAGAUCAAGCAGA | 1018 | UCUGCUUGAUCUCAUACUG | 1633 | Rh, Rb, Cw, Dg, Ms | [509-527] ORF |
| CUUGCAAAAUGCUUCCAAA | 1019 | UUUGGAAGCAUUUUGCAAG | 1634 | | [2471-2489] 3′UTR |
| CUUGGUAGGUAUUAGACUU | 1020 | AAGUCUAAUACCUACCAAG | 1635 | | [2906-2924] 3′UTR |
| CCCUCUGAGCCUUGUAGAA | 1021 | UUCUACAAGGCUCAGAGGG | 1636 | Rh | [1604-1622] 3′UTR |
| GGUAGGUAUUAGACUUGCA | 1022 | UGCAAGUCUAAUACCUACC | 1637 | | [2909-2927] 3′UTR |
| GGGUCACAGAGAAGAACAU | 1023 | AUGUUCUUCUCUGUGACCC | 1638 | Rh | [831-849] ORF |
| GAACCUGAGUUGCAGAUAU | 1024 | AUAUCUGCAACUCAGGUUC | 1639 | Rh | [2187-2205] 3′UTR |
| GGAUUGAGUUGCACAGCUU | 1025 | AAGCUGUGCAACUCAAUCC | 1640 | | [1853-1871] 3′UTR |
| GGUGAUAUCAUAUGUAACA | 1026 | UGUUACAUAUGAUAUCACC | 1641 | Rh | [2796-2814] 3′UTR |
| CCUGCAAGCAACUCAAAAU | 1027 | AUUUUGAGUUGCUUGCAGG | 1642 | | [3343-3361] 3′UTR |
| GGAUAUAGAGUUUAUCUAC | 1028 | GUAGAUAAACUCUAUAUCC | 1643 | | [553-571] ORF |
| GAUGCUUUGUAUCAUUCUU | 1029 | AAGAAUGAUACAAAGCAUC | 1644 | | [3589-3607] 3′UTR |
| GCAAGCAACUCAAAAUAUU | 1030 | AAUAUUUUGAGUUGCUUGC | 1645 | | [3346-3364] 3′UTR |
| CGUCUUUGGUUCUCCAGUU | 1031 | AACUGGAGAACCAAAGACG | 1646 | | [3055-3073] 3′UTR |
| CCUUUAUAUUUGAUCCACA | 1032 | UGUGGAUCAAAUAUAAAGG | 1647 | | [3127-3145] 3′UTR |
| GUGCUGAGCAGAAAACAAA | 1033 | UUUGUUUUCUGCUCAGCAC | 1648 | | [3164-3182] 3′UTR |
| CCAACUUCUGCUUGUAUUU | 1034 | AAAUACAAGCAGAAGUUGG | 1649 | Rh | [2207-2225] 3′UTR |
| CCUAUUAAUCCUCAGAAUU | 1035 | AAUUCUGAGGAUUAAUAGG | 1650 | Rh | [1572-1590] 3′UTR |
| CGGUAAUGAUAAGGAGAAU | 1036 | AUUCUCCUUAUCAUUACCG | 1651 | | [2345-2363] 3′UTR |
| CGCUCAAAUACCUUCACAA | 1037 | UUGUGAAGGUAUUUGAGCG | 1652 | | [3223-3241] 3′UTR |
| GGGCAGACUGGGAGGGUAU | 1038 | AUACCCUCCCAGUCUGCCC | 1653 | Rh | [2619-2637] 3′UTR |
| UGCUGAGCAGAAAACAAAA | 1039 | UUUUGUUUUCUGCUCAGCA | 1654 | | [3165-3183] 3′UTR |
| AGCGGUCAGUGAGAAGGAA | 1040 | UUCCUUCUCACUGACCGCU | 1655 | | [445-463] ORF |
| GGUAUUAGACUUGCACUUU | 1041 | AAAGUGCAAGUCUAAUACC | 1656 | | [2913-2931] 3′UTR |
| GCUGGAAUAUGAAGUCUGA | 1042 | UCAGACUUCAUAUUCCAGC | 1657 | Ms | [3505-3523] 3′UTR |
| CCUGUGUUGUAAAGAUAAA | 1043 | UUUAUCUUUACAACACAGG | 1658 | Rh | [2380-2398] 3′UTR |
| GGUAAGAUGUCAUAAUGGA | 1044 | UCCAUUAUGACAUCUUACC | 1659 | Rh | [2694-2712] 3′UTR |
| GUGGUUUCCUGAAGCCAGU | 1045 | ACUGGCUUCAGGAAACCAC | 1660 | | [2295-2313] 3′UTR |
| GGGUCCAAAUUAAUAUGAU | 1046 | AUCAUAUUAAUUUGGACCC | 1661 | | [1077-1095] 3′UTR |
| GGAACACACAAGAGUUGUU | 1047 | AACAACUCUUGUGUGUUCC | 1662 | | [3539-3557] 3′UTR |
| AGAUUACCUAGCUAAGAAA | 1048 | UUUCUUAGCUAGGUAAUCU | 1663 | | [2238-2256] 3′UTR |
| CUGGGAACACACAAGAGUU | 1049 | AACUCUUGUGUGUUCCCAG | 1664 | | [3536-3554] 3′UTR |
| UCCCAUGGGUCCAAAUUAA | 1050 | UUAAUUUGGACCCAUGGGA | 1665 | | [1071-1089] 3′UTR |
| GUUCUCCAGUUCAAAUUAU | 1051 | AUAAUUUGAACUGGAGAAC | 1666 | | [3063-3081] 3′UTR |
| CCAUGGGUCCAAAUUAAUA | 1052 | UAUUAAUUUGGACCCAUGG | 1667 | | [1073-1091] 3′UTR |
| UGGGCGUGGUCUUGCAAAA | 1053 | UUUUGCAAGACCACGCCCA | 1668 | | [2461-2479] 3′UTR |
| CGUGCUGAGCAGAAAACAA | 1054 | UUGUUUUCUGCUCAGCACG | 1669 | | [3163-3181] 3′UTR |
| CGGUCAGUGAGAAGGAAGU | 1055 | ACUUCCUUCUCACUGACCG | 1670 | | [447-465] ORF |
| CGAUAUACAGGCACAUUAU | 1056 | AUAAUGUGCCUGUAUAUCG | 1671 | | [2403-2421] 3′UTR |
| GCAUUUUGCAGAAACUUUU | 1057 | AAAAGUUUCUGCAAAAUGC | 1672 | Rh | [1334-1352] 3′UTR |
| GGACCAGUCCAUGUGAUUU | 1058 | AAAUCACAUGGACUGGUCC | 1673 | Rh | [2710-2728] 3′UTR |
| GCUCAAAUACCUUCACAAU | 1059 | AUUGUGAAGGUAUUUGAGC | 1674 | | [3224-3242] 3′UTR |
| CACCUUAGCCUGUUCUAUU | 1060 | AAUAGAACAGGCUAAGGUG | 1675 | Rh | [2492-2510] 3′UTR |
| GGAUCUCCCAGCUGGGUUA | 1061 | UAACCCAGCUGGGAGAUCC | 1676 | | [1296-1314] 3′UTR |
| GUAUUAGACUUGCACUUUU | 1062 | AAAAGUGCAAGUCUAAUAC | 1677 | | [2914-2932] 3′UTR |
| AGAGGAUCCAGUAUGAGAU | 1063 | AUCUCAUACUGGAUCCUCU | 1678 | Rh, Rb | [501-519] ORF |
| GAACCUAUGUGUUCCCUCA | 1064 | UGAGGGAACACAUAGGUUC | 1679 | | [2274-2292] 3′UTR |
| CUGAGUUGCAGAUAUACCA | 1065 | UGGUAUAUCUGCAACUCAG | 1680 | Rh | [2191-2209] 3′UTR |
| CUCAAAUACCUUCACAAUA | 1066 | UAUUGUGAAGGUAUUUGAG | 1681 | | [3225-3243] 3′UTR |
| UCCUAUUAAUCCUCAGAAU | 1067 | AUUCUGAGGAUUAAUAGGA | 1682 | Rh | [1571-1589] 3′UTR |
| CCAGUUCAAAUUAUUGCAA | 1068 | UUGCAAUAAUUUGAACUGG | 1683 | | [3068-3086] 3′UTR |
| UGUUUAUGCUGGAAUAUGA | 1069 | UCAUAUUCCAGCAUAAACA | 1684 | | [3498-3516] 3′UTR |
| GCACAGAUCUUGAUGACUU | 1070 | AAGUCAUCAAGAUCUGUGC | 1685 | Rh | [2591-2609] 3′UTR |
| AACCUGAGUUGCAGAUAUA | 1071 | UAUAUCUGCAACUCAGGUU | 1686 | Rh | [2188-2206] 3 ′UTR |
| CUGCAAGCAACUCAAAAUA | 1072 | UAUUUUGAGUUGCUUGCAG | 1687 | | [3344-3362] 3′UTR |
| GGCUUUGGUGACACACUCA | 1073 | UGAGUGUGUCACCAAAGCC | 1688 | | [2086-2104] 3′UTR |
| GUUGCAAGACUGUGUAGCA | 1074 | UGCUACACAGUCUUGCAAC | 1689 | Rh | [1360-1378] 3′UTR |
| GACAUUUAUGGCAACCCUA | 1075 | UAGGGUUGCCAUAAAUGUC | 1690 | | [479-497] ORF |
| GUAUGAGAUCAAGCAGAUA | 1076 | UAUCUGCUUGAUCUCAUAC | 1691 | Rh, Rb, Cw, Dg, Rt, Ms | [511-529] ORF |
| GACUUGCUGCCGUAAUUUA | 1077 | UAAAUUACGGCAGCAAGUC | 1692 | | [3428-3446] 3′UTR |
| GAAAGAAGGAAUAUCUCAU | 1078 | AUGAGAUAUUCCUUCUUUC | 1693 | | [618-636] ORF |
| GAGGAAAGAAGGAAUAUCU | 1079 | AGAUAUUCCUUCUUUCCUC | 1694 | Rt | [615-633] ORF |
| CGUGGACAAUAAACAGUAU | 1080 | AUACUGUUUAUUGUCCACG | 1695 | | [3624-3642] 3 ′UTR |
| GGUGAACCUGAGUUGCAGA | 1081 | UCUGCAACUCAGGUUCACC | 1696 | Rh | [2184-2202] 3′UTR |
| CCUGCAUCAAGAGAAGUGA | 1082 | UCACUUCUCUUGAUGCAGG | 1697 | Rt, Ms | [876-894] ORF |
| AGUCCAUGUGAUUUCAGUA | 1083 | UACUGAAAUCACAUGGACU | 1698 | Rh | [2715-2733] 3′UTR |
| AGUAAAGGAUCUUUGAGUA | 1084 | UACUCAAAGAUCCUUUACU | 1699 | | [3087-3105] 3′UTR |
| CCCAGAAGAAGAGCCUGAA | 1085 | UUCAGGCUCUUCUUCUGGG | 1700 | Rh, Cw, Ms, Pg | [717-735] ORF |
| GACAUCAGCUGUAAUCAUU | 1086 | AAUGAUUACAGCUGAUGUC | 1701 | | [2864-2882] 3′UTR |
| CCUCAAAGACUGACAGCCA | 1087 | UGGCUGUCAGUCUUUGAGG | 1702 | Rh | [1980-1998] 3′UTR |
| CUCGGUCCGUGGACAAUAA | 1088 | UUAUUGUCCACGGACCGAG | 1703 | | [3617-3635] 3′UTR |
| AGGGCAGCCUGGAACCAGU | 1089 | ACUGGUUCCAGGCUGCCCU | 1704 | | [1525-1543] 3′UTR |
| CCGUGGACAAUAAACAGUA | 1090 | UACUGUUUAUUGUCCACGG | 1705 | | [3623-3641] 3′UTR |
| GAAACGACAUUUAUGGCAA | 1091 | UUGCCAUAAAUGUCGUUUC | 1706 | | [474-492] ORF |
| CCUCAGAAUUCCAGUGGGA | 1092 | UCCCACUGGAAUUCUGAGG | 1707 | Rh | [1581-1599] 3′UTR |
| GUCACAGAGAAGAACAUCA | 1093 | UGAUGUUCUUCUCUGUGAC | 1708 | Rh | [833-851] ORF |
| CCAGUGGCUAGUUCUUGAA | 1094 | UUCAAGAACUAGCCACUGG | 1709 | | [1539-1557] 3′UTR |
| GGAACCAGUGGCUAGUUCU | 1095 | AGAACUAGCCACUGGUUCC | 1710 | | [1535-1553] 3′UTR |
| UCCAUGUGAUUUCAGUAUA | 1096 | UAUACUGAAAUCACAUGGA | 1711 | Rh | [2717-2735] 3′UTR |
| AGGUAUUAGACUUGCACUU | 1097 | AAGUGCAAGUCUAAUACCU | 1712 | | [2912-2930] 3′UTR |
| CAUUUGACCCAGAGUGGAA | 1098 | UUCCACUCUGGGUCAAAUG | 1713 | | [2961-2979] 3′UTR |
| GCACCUGGAUUGAGUUGCA | 1099 | UGCAACUCAAUCCAGGUGC | 1714 | | [1847-1865] 3′UTR |
| AGUUGUUGAAAGUUGACAA | 1100 | UUGUCAACUUUCAACAACU | 1715 | | [3551-3569] 3′UTR |
| GUGGCCAACUGCAAAAAAA | 1101 | UUUUUUUGCAGUUGGCCAC | 1716 | | [984-1002] 3′UTR |
| CUCAAAGACUGACAGCCAU | 1102 | AUGGCUGUCAGUCUUUGAG | 1717 | Rh | [1981-1999] 3′UTR |
| GCCUCAGCUGAGUCUUUUU | 1103 | AAAAAGACUCAGCUGAGGC | 1718 | Rh | [1658-1676] 3′UTR |
| UGCUUUGUAUCAUUCUUGA | 1104 | UCAAGAAUGAUACAAAGCA | 1719 | | [3591-3609] 3′UTR |
| GUUUAAGAAGGCUCUCCAU | 1105 | AUGGAGAGCCUUCUUAAAC | 1720 | | [3265-3283] 3′UTR |
| CCAGCUAAGCAUAGUAAGA | 1106 | UCUUACUAUGCUUAGCUGG | 1721 | | [2030-2048] 3′UTR |
| GUUGGUAAGAUGUCAUAAU | 1107 | AUUAUGACAUCUUACCAAC | 1722 | Rh | [2691-2709] 3′UTR |
| CACCUGUGUUGUAAAGAUA | 1108 | UAUCUUUACAACACAGGUG | 1723 | Rh | [2378-2396] 3′UTR |
| CAGCCUCAGCUGAGUCUUU | 1109 | AAAGACUCAGCUGAGGCUG | 1724 | Rh | [1656-1674] 3′UTR |
| AUGAGAUCAAGCAGAUAAA | 1110 | UUUAUCUGCUUGAUCUCAU | 1725 | Rh, Cw, Dg, Rt, Ms | [513-531] ORF |
| GUUGCACAGCUUUGCUUUA | 1111 | UAAAGCAAAGCUGUGCAAC | 1726 | | [1860-1878] 3′UTR |
| GUGGCUAGUUCUUGAAGGA | 1112 | UCCUUCAAGAACUAGCCAC | 1727 | | [1542-1560] 3′UTR |
| GAUUGAGUUGCACAGCUUU | 1113 | AAAGCUGUGCAACUCAAUC | 1728 | | [1854-1872] 3′UTR |
| GGAUCUUUGAGUAGGUUCG | 1114 | CGAACCUACUCAAAGAUCC | 1729 | | [3093-3111] 3′UTR |
| CGCUGGACGUUGGAGGAAA | 1115 | UUUCCUCCAACGUCCAGCG | 1730 | Rt, Ms | [603-621] ORF |
| CACACACGUUGGUCUUUUA | 1116 | UAAAAGACCAACGUGUGUG | 1731 | | [3142-3160] 3′UTR |
| CUCAGUGUGGUUUCCUGAA | 1117 | UUCAGGAAACCACACUGAG | 1732 | | [2289-2307] 3′UTR |
| AUGUUAUGUUCUAAGCACA | 1118 | UGUGCUUAGAACAUAACAU | 1733 | | [3303-3321] 3′UTR |
| GCCACCUUAGCCUGUUCUA | 1119 | UAGAACAGGCUAAGGUGGC | 1734 | Rh | [2490-2508] 3′UTR |
| AAGAGUUGUUGAAAGUUGA | 1120 | UCAACUUUCAACAACUCUU | 1735 | | [3548-3566] 3′UTR |
| CCUGAGAAGGAUAUAGAGU | 1121 | ACUCUAUAUCCUUCUCAGG | 1736 | | [545-563] ORF |
| ACCAGUGGCUAGUUCUUGA | 1122 | UCAAGAACUAGCCACUGGU | 1737 | | [1538-1556] 3′UTR |
| CAUCCUGCAAGCAACUCAA | 1123 | UUGAGUUGCUUGCAGGAUG | 1738 | | [3340-3358] 3′UTR |
| GUAAUGAUAAGGAGAAUCU | 1124 | AGAUUCUCCUUAUCAUUAC | 1739 | | [2347-2365] 3′UTR |
| GGAAUAUCUCAUUGCAGGA | 1125 | UCCUGCAAUGAGAUAUUCC | 1740 | | [625-643] ORF |
| GGGCGUGGUCUUGCAAAAU | 1126 | AUUUUGCAAGACCACGCCC | 1741 | | [2462-2480] 3′UTR |
| CAUCCUGAGGACAGAAAAA | 1127 | UUUUUCUGUCCUCAGGAUG | 1742 | Rh | [1921-1939] 3′UTR |
| UGGACUUGCUGCCGUAAUU | 1128 | AAUUACGGCAGCAAGUCCA | 1743 | | [3426-3444] 3′UTR |
| GUGACACACUCACUUCUUU | 1129 | AAAGAAGUGAGUGUGUCAC | 1744 | | [2093-2111] 3 ′UTR |
| CUGUUUUAAGAGACAUCUU | 1130 | AAGAUGUCUCUUAAAACAG | 1745 | Rh | [2135-2153] 3′UTR |
| GUUUAUGCUGGAAUAUGAA | 1131 | UUCAUAUUCCAGCAUAAAC | 1746 | | [3499-3517] 3′UTR |
| GUCCAUGUGAUUUCAGUAU | 1132 | AUACUGAAAUCACAUGGAC | 1747 | Rh | [2716-2734] 3′UTR |
| AGGAGUUUCUCGACAUCGA | 1133 | UCGAUGUCGAGAAACUCCU | 1748 | Ck, Dg | [936-954] ORF |
| GAAGAACUUUCUCGGUAAU | 1134 | AUUACCGAGAAAGUUCUUC | 1749 | Rh | [2333-2351] 3′UTR |
| GGGUCUGGAGGGAGACGUG | 1135 | CACGUCUCCCUCCAGACCC | 1750 | | [1130-1148] 3′UTR |
| GGAAGCCGCUCAAAUACCU | 1136 | AGGUAUUUGAGCGGCUUCC | 1751 | | [3217-3235] 3′UTR |
| GGUCCGUGGACAAUAAACA | 1137 | UGUUUAUUGUCCACGGACC | 1752 | | [3620-3638] 3′UTR |
| CCCUCCAACCCAUAUAACA | 1138 | UGUUAUAUGGGUUGGAGGG | 1753 | | [2752-2770] 3′UTR |
| CCCAUGGGUCCAAAUUAAU | 1139 | AUUAAUUUGGACCCAUGGG | 1754 | | [1072-1090] 3′UTR |
| CACACUCACUUCUUUCUCA | 1140 | UGAGAAAGAAGUGAGUGUG | 1755 | | [2097-2115] 3′UTR |
| GCAGAAAACAAAACAGGUU | 1141 | AACCUGUUUUGUUUUCUGC | 1756 | | [3171-3189] 3′UTR |
| CAUCAAUCCUAUUAAUCCU | 1142 | AGGAUUAAUAGGAUUGAUG | 1757 | Rh | [1565-1583] 3′UTR |
| CACAAUAAAUAGUGGCAAU | 1143 | AUUGCCACUAUUUAUUGUG | 1758 | | [3237-3255] 3′UTR |
| GUUGGAGGAAAGAAGGAAU | 1144 | AUUCCUUCUUUCCUCCAAC | 1759 | Rt | [611-629] ORF |
| GGCCUUUAUAUUUGAUCCA | 1145 | UGGAUCAAAUAUAAAGGCC | 1760 | | [3125-3143] 3′UTR |
| UGUUCAAAGGGCCUGAGAA | 1146 | UUCUCAGGCCCUUUGAACA | 1761 | | [534-552] ORF |
| ACUGGGUCACAGAGAAGAA | 1147 | UUCUUCUCUGUGACCCAGU | 1762 | Rh, Rt, Ms | [828-846] ORF |
| GGUAAUGAUAAGGAGAAUC | 1148 | GAUUCUCCUUAUCAUUACC | 1763 | | [2346-2364] 3′UTR |
| CACACAAGAGUUGUUGAAA | 1149 | UUUCAACAACUCUUGUGUG | 1764 | | [3543-3561] 3′UTR |
| CUCUGGAUGGACUGGGUCA | 1150 | UGACCCAGUCCAUCCAGAG | 1765 | Rh, Rb, Cw, Dg, Rt, Ms, | [818-836] ORF |
| | | | | Pg | |
| GGAACUAGGGAACCUAUGU | 1151 | ACAUAGGUUCCCUAGUUCC | 1766 | Rh | [2265-2283] 3′UTR |
| CUCGGUAAUGAUAAGGAGA | 1152 | UCUCCUUAUCAUUACCGAG | 1767 | | [2343-2361] 3′UTR |
| AGGUGAAUUCUCAGAUGAU | 1153 | AUCAUCUGAGAAUUCACCU | 1768 | | [2164-2182] 3′UTR |
| UCGGUAAUGAUAAGGAGAA | 1154 | UUCUCCUUAUCAUUACCGA | 1769 | | [2344-2362] 3′UTR |
| GCCAAAGCGGUCAGUGAGA | 1155 | UCUCACUGACCGCUUUGGC | 1770 | | [440-458] ORF |
| GAACCAGUGGCUAGUUCUU | 1156 | AAGAACUAGCCACUGGUUC | 1771 | | [1536-1554] 3′UTR |
| CCCUUCUCCUUUUAGACAU | 1157 | AUGUCUAAAAGGAGAAGGG | 1772 | | [1105-1123] 3′UTR |
| CCACCUUAGCCUGUUCUAU | 1158 | AUAGAACAGGCUAAGGUGG | 1773 | Rh | [2491-2509] 3′UTR |
| CCCUGAGCACCACCCAGAA | 1159 | UUCUGGGUGGUGCUCAGGG | 1774 | Rh, Pg | [705-723] ORF |
| UGCUGUACAGUGACCUAAA | 1160 | UUUAGGUCACUGUACAGCA | 1775 | | [2672-2690] 3′UTR |
| CCUUAGCCUGUUCUAUUCA | 1161 | UGAAUAGAACAGGCUAAGG | 1776 | Rh | [2494-2512] 3′UTR |
| GAACUUUCUCGGUAAUGAU | 1162 | AUCAUUACCGAGAAAGUUC | 1777 | | [2336-2354] 3′UTR |
| CCUAGGAAGGGAAGGAUUU | 1163 | AAAUCCUUCCCUUCCUAGG | 1778 | Rh | [2056-2074] 3′UTR |
| UCAGUGAGAAGGAAGUGGA | 1164 | UCCACUUCCUUCUCACUGA | 1779 | | [450-468] ORF |
| AUAUGAAGUCUGAGACCUU | 1165 | AAGGUCUCAGACUUCAUAU | 1780 | | [3511-3529] 3′UTR |
| GGACUCUGGAAACGACAUU | 1166 | AAUGUCGUUUCCAGAGUCC | 1781 | Rh | [466-484] ORF |
| CCUCUGAGCCUUGUAGAAA | 1167 | UUUCUACAAGGCUCAGAGG | 1782 | Rh | [1605-1623] 3′UTR |
| AGUUUAAGAAGGCUCUCCA | 1168 | UGGAGAGCCUUCUUAAACU | 1783 | | [3264-3282] 3′UTR |
| AGGGCAGACUGGGAGGGUA | 1169 | UACCCUCCCAGUCUGCCCU | 1784 | Rh | [2618-2636] 3′UTR |
| GUAGAAAUGGGAGCGAGAA | 1170 | UUCUCGCUCCCAUUUCUAC | 1785 | | [1617-1635] 3′UTR |
| GGACUUGCUGCCGUAAUUU | 1171 | AAAUUACGGCAGCAAGUCC | 1786 | | [3427-3445] 3′UTR |
| AGAACUUUCUCGGUAAUGA | 1172 | UCAUUACCGAGAAAGUUCU | 1787 | | [2335-2353] 3′UTR |
| GUAUCAUUCUUGAGCAAUC | 1173 | GAUUGCUCAAGAAUGAUAC | 1788 | | [3597-3615] 3′UTR |
| CAGCUAAGCAUAGUAAGAA | 1174 | UUCUUACUAUGCUUAGCUG | 1789 | | [2031-2049] 3′UTR |
| GGCCUGUUUUAAGAGACAU | 1175 | AUGUCUCUUAAAACAGGCC | 1790 | Rh | [2132-2150] 3′UTR |
| GACUGGGUCACAGAGAAGA | 1176 | UCUUCUCUGUGACCCAGUC | 1791 | Rh, Rt, Ms | [827-845] ORF |
| CUCUGAUGCUUUGUAUCAU | 1177 | AUGAUACAAAGCAUCAGAG | 1792 | | [3585-3603] 3′UTR |
| GUAACAUUUACUCCUGUUU | 1178 | AAACAGGAGUAAAUGUUAC | 1793 | Rh | [2809-2827] 3′UTR |
| UGAGUUGCAGAUAUACCAA | 1179 | UUGGUAUAUCUGCAACUCA | 1794 | Rh | [2192-2210] 3′UTR |
| AUCCCAUGGGUCCAAAUUA | 1180 | UAAUUUGGACCCAUGGGAU | 1795 | | [1070-1088] 3′UTR |
| CUCUGGAAACGACAUUUAU | 1181 | AUAAAUGUCGUUUCCAGAG | 1796 | Rh | [469-487] ORF |
| GAUCCAGUAUGAGAUCAAG | 1182 | CUUGAUCUCAUACUGGAUC | 1797 | Rh, Rb | [505-523] ORF |
| AGGUGUGGCCUUUAUAUUU | 1183 | AAAUAUAAAGGCCACACCU | 1798 | | [3119-3137] 3′UTR |
| CCCUGUUCGCUUCCUGUAU | 1184 | AUACAGGAAGCGAACAGGG | 1799 | | [2777-2795] 3′UTR |
| GGGAGACGUGGGUCCAAGG | 1185 | CCUUGGACCCACGUCUCCC | 1800 | | [1139-1157] 3′UTR |
| CAUGGGUCCAAAUUAAUAU | 1186 | AUAUUAAUUUGGACCCAUG | 1801 | | [1074-1092] 3′UTR |
| UGGGUCACAGAGAAGAACA | 1187 | UGUUCUUCUCUGUGACCCA | 1802 | Rh | [830-848] ORF |
| CCUCAAGGUCCCUUCCCUA | 1188 | UAGGGAAGGGACCUUGAGG | 1803 | | [1786-1804] 3′UTR |
| UGGUUCUCCAGUUCAAAUU | 1189 | AAUUUGAACUGGAGAACCA | 1804 | | [3061-3079] 3′UTR |
| GGACCUGGUCAGCACAGAU | 1190 | AUCUGUGCUGACCAGGUCC | 1805 | Rh | [2580-2598] 3′UTR |
| GGAGGGAGACGUGGGUCCA | 1191 | UGGACCCACGUCUCCCUCC | 1806 | | [1136-1154] 3′UTR |
| UCUGAUGCUUUGUAUCAUU | 1192 | AAUGAUACAAAGCAUCAGA | 1807 | | [3586-3604] 3′UTR |
| GGGACAUGGCCCUUGUUUU | 1193 | AAAACAAGGGCCAUGUCCC | 1808 | | [1407-1425] 3′UTR |
| GCCUGGGCGUGGUCUUGCA | 1194 | UGCAAGACCACGCCCAGGC | 1809 | | [2458-2476] 3′UTR |
| GGCGUUUUGCAAUGCAGAU | 1195 | AUCUGCAUUGCAAAACGCC | 1810 | Cw, Rt, Ms | [409-427] ORF |
| GAGUAGGUUCGGUCUGAAA | 1196 | UUUCAGACCGAACCUACUC | 1811 | | [3101-3119] 3′UTR |
| AGUUCUUCGCCUGCAUCAA | 1197 | UUGAUGCAGGCGAAGAACU | 1812 | Rh, Rb, Cw, Dg, Ms | [867-885] ORF |
| ACAAAGAUUACCUAGCUAA | 1198 | UUAGCUAGGUAAUCUUUGU | 1813 | | [2234-2252] 3′UTR |
| GAGGGAGACGUGGGUCCAA | 1199 | UUGGACCCACGUCUCCCUC | 1814 | | [1137-1155] 3′UTR |
| CUGUUUCUGCUGAUUGUUU | 1200 | AAACAAUCAGCAGAAACAG | 1815 | | [2822-2840] 3′UTR |
| CUGACGAUAUACAGGCACA | 1201 | UGUGCCUGUAUAUCGUCAG | 1816 | | [2399-2417] 3′UTR |
| UGUUGAAAGUUGACAAGCA | 1202 | UGCUUGUCAACUUUCAACA | 1817 | | [3554-3572] 3′UTR |
| GCCUAGGAAGGGAAGGAUU | 1203 | AAUCCUUCCCUUCCUAGGC | 1818 | Rh | [2055-2073] 3′UTR |
| GGUGACACACUCACUUCUU | 1204 | AAGAAGUGAGUGUGUCACC | 1819 | | [2092-2110] 3′UTR |
| GAGCCUUGUAGAAAUGGGA | 1205 | UCCCAUUUCUACAAGGCUC | 1820 | Rh | [1610-1628] 3′UTR |
| CAGAAAACAAAACAGGUUA | 1206 | UAACCUGUUUUGUUUUCUG | 1821 | | [3172-3190] 3′UTR |
| CGCAUGUCUCUGAUGCUUU | 1207 | AAAGCAUCAGAGACAUGCG | 1822 | | [3578-3596] 3′UTR |
| GACAAAGAUUACCUAGCUA | 1208 | UAGCUAGGUAAUCUUUGUC | 1823 | | [2233-2251] 3′UTR |
| CUGUAUGGUGAUAUCAUAU | 1209 | AUAUGAUAUCACCAUACAG | 1824 | | [2790-2808] 3′UTR |
| GACUCUGGAAACGACAUUU | 1210 | AAAUGUCGUUUCCAGAGUC | 1825 | Rh | [467-485] ORF |
| GGUUCGGUCUGAAAGGUGU | 1211 | ACACCUUUCAGACCGAACC | 1826 | | [3106-3124] 3′UTR |
| AGAUGAUAGGUGAACCUGA | 1212 | UCAGGUUCACCUAUCAUCU | 1827 | | [2176-2194] 3′UTR |
| GACACUAUGGCCUGUUUUA | 1213 | UAAAACAGGCCAUAGUGUC | 1828 | | [2124-2142] 3′UTR |
| CUGCAAAAAAAGCCUCCAA | 1214 | UUGGAGGCUUUUUUUGCAG | 1829 | | [992-1010] 3′UTR |
| CUGUUCUAUUCAGCGGCAA | 1215 | UUGCCGCUGAAUAGAACAG | 1830 | | [2501-2519] 3′UTR |
| GUGGGUCCAAGGUCCUCAU | 1216 | AUGAGGACCUUGGACCCAC | 1831 | | [1146-1164] 3′UTR |
| GCCUGAGAAGGAUAUAGAG | 1217 | CUCUAUAUCCUUCUCAGGC | 1832 | | [544-562] ORF |
| GAAACUUCCUAGGGAACUA | 1218 | UAGUUCCCUAGGAAGUUUC | 1833 | | [2253-2271] 3′UTR |
| CGCCAGCUAAGCAUAGUAA | 1219 | UUACUAUGCUUAGCUGGCG | 1834 | | [2028-2046] 3′UTR |
| GCCUCUGGAUGGACUGGGU | 1220 | ACCCAGUCCAUCCAGAGGC | 1835 | Rh, Rb, Cw, Dg, Rt, Ms | [816-834] ORF |
| ACGAUAUACAGGCACAUUA | 1221 | UAAUGUGCCUGUAUAUCGU | 1836 | | [2402-2420] 3′UTR |
| AGCACCACCCAGAAGAAGA | 1222 | UCUUCUUCUGGGUGGUGCU | 1837 | Rh, Pg | [710-728] ORF |
| CCUCCCUCAAAGACUGACA | 1223 | UGUCAGUCUUUGAGGGAGG | 1838 | Rh | [1976-1994] 3′UTR |
| GGAGCACUGUGUUUAUGCU | 1224 | AGCAUAAACACAGUGCUCC | 1839 | | [3489-3507] 3′UTR |
| ACUUGCUGCCGUAAUUUAA | 1225 | UUAAAUUACGGCAGCAAGU | 1840 | | [3429-3447] 3′UTR |
| GGUUUCCUGAAGCCAGUGA | 1226 | UCACUGGCUUCAGGAAACC | 1841 | | [2297-2315] 3′UTR |
| GGUCAGUGAGAAGGAAGUG | 1227 | CACUUCCUUCUCACUGACC | 1842 | | [448-466] ORF |
| GUGACGCCAGCUAAGCAUA | 1228 | UAUGCUUAGCUGGCGUCAC | 1843 | | [2024-2042] 3′UTR |
| AUGAUAAGGAGAAUCUCUU | 1229 | AAGAGAUUCUCCUUAUCAU | 1844 | | [2350-2368] 3′UTR |
| UAGUGUUCCCUCCCUCAAA | 1230 | UUUGAGGGAGGGAACACUA | 1845 | | [1968-1986] 3′UTR |
| GGAGACGUGGGUCCAAGGU | 1231 | ACCUUGGACCCACGUCUCC | 1846 | | [1140-1158] 3′UTR |
| CCUGUUCUAUUCAGCGGCA | 1232 | UGCCGCUGAAUAGAACAGG | 1847 | | [2500-2518] 3′UTR |
| UCCAGUAUGAGAUCAAGCA | 1233 | UGCUUGAUCUCAUACUGGA | 1848 | Rh, Rb | [507-525] ORF |
| CAAAAUGCUUCCAAAGCCA | 1234 | UGGCUUUGGAAGCAUUUUG | 1849 | Rh | [2475-2493] 3′UTR |
| CACACGCAAUGAAACCGAA | 1235 | UUCGGUUUCAUUGCGUGUG | 1850 | | [2431-2449] 3′UTR |
| CUCCAUUUGGCAUCGUUUA | 1236 | UAAACGAUGCCAAAUGGAG | 1851 | | [3278-3296] 3′UTR |
| AGCAGGAGUUUCUCGACAU | 1237 | AUGUCGAGAAACUCCUGCU | 1852 | Ck, Dg | [933-951] ORF |
| GUGUGGCCUUUAUAUUUGA | 1238 | UCAAAUAUAAAGGCCACAC | 1853 | | [3121-3139] 3′UTR |
| GGGACCUGGUCAGCACAGA | 1239 | UCUGUGCUGACCAGGUCCC | 1854 | Rh | [2579-2597] 3′UTR |
| CCUCAGUGUGGUUUCCUGA | 1240 | UCAGGAAACCACACUGAGG | 1855 | | [2288-2306] 3′UTR |
| GACCCAGAGUGGAACGCGU | 1241 | ACGCGUUCCACUCUGGGUC | 1856 | | [2966-2984] 3′UTR |
| CCACCUGUGUUGUAAAGAU | 1242 | AUCUUUACAACACAGGUGG | 1857 | Rh | [2377-2395] 3′UTR |
| ACCUGUGUUGUAAAGAUAA | 1243 | UUAUCUUUACAACACAGGU | 1858 | Rh | [2379-2397] 3′UTR |
| GUUUUGCAAUGCAGAUGUA | 1244 | UACAUCUGCAUUGCAAAAC | 1859 | | [412-430] ORF |
| AAAAAAGCCUCCAAGGGUU | 1245 | AACCCUUGGAGGCUUUUUU | 1860 | | [997-1015] 3′UTR |
| UAAGAAACUUCCUAGGGAA | 1246 | UUCCCUAGGAAGUUUCUUA | 1861 | | [2250-2268] 3′UTR |
| GCAUUUGACCCAGAGUGGA | 1247 | UCCACUCUGGGUCAAAUGC | 1862 | | [2960-2978] 3′UTR |
| CCCUCAAGGUCCCUUCCCU | 1248 | AGGGAAGGGACCUUGAGGG | 1863 | | [1785-1803] 3′UTR |
| AGGAUCCAGUAUGAGAUCA | 1249 | UGAUCUCAUACUGGAUCCU | 1864 | Rh, Rb | [503-521] ORF |
| AAGAUUACCUAGCUAAGAA | 1250 | UUCUUAGCUAGGUAAUCUU | 1865 | | [2237-2255] 3′UTR |
| CUAUGUGUUCCCUCAGUGU | 1251 | ACACUGAGGGAACACAUAG | 1866 | | [2278-2296] 3′UTR |
| GACAGAGGAAGCCGCUCAA | 1252 | UUGAGCGGCUUCCUCUGUC | 1867 | | [3211-3229] 3′UTR |
| UUAAGAAGGCUCUCCAUUU | 1253 | AAAUGGAGAGCCUUCUUAA | 1868 | | [3267-3285] 3′UTR |
| UAAGGAGAAUCUCUUGUUU | 1254 | AAACAAGAGAUUCUCCUUA | 1869 | | [2354-2372] 3′UTR |
| GUUUCCUGAAGCCAGUGAU | 1255 | AUCACUGGCUUCAGGAAAC | 1870 | | [2298-2316] 3′UTR |
| UGAGCACCACCCAGAAGAA | 1256 | UUCUUCUGGGUGGUGCUCA | 1871 | Rh, Pg | [708-726] ORF |
| CUAUUAAUCCUCAGAAUUC | 1257 | GAAUUCUGAGGAUUAAUAG | 1872 | Rh | [1573-1591] 3′UTR |
| CUGGGCGUGGUCUUGCAAA | 1258 | UUUGCAAGACCACGCCCAG | 1873 | | [2460-2478] 3′UTR |
| GGAGGAAAGAAGGAAUAUC | 1259 | GAUAUUCCUUCUUUCCUCC | 1874 | Rt | [614-632] ORF |
| CCAAGUUCUUCGCCUGCAU | 1260 | AUGCAGGCGAAGAACUUGG | 1875 | Rh, Rb, Cw, Dg, Ms | [864-882] ORF |
| GUUUCUGCUGAUUGUUUUU | 1261 | AAAAACAAUCAGCAGAAAC | 1876 | | [2824-2842] 3′UTR |
| GGUCCAAGGUCCUCAUCCC | 1262 | GGGAUGAGGACCUUGGACC | 1877 | | [1149-1167] 3′UTR |
| AGUUGGUAAGAUGUCAUAA | 1263 | UUAUGACAUCUUACCAACU | 1878 | Rh | [2690-2708] 3′UTR |
| GGAAUAUGAAGUCUGAGAC | 1264 | GUCUCAGACUUCAUAUUCC | 1879 | Ms | [3508-3526] 3′UTR |
| GAGUGGAACGCGUGGCCUA | 1265 | UAGGCCACGCGUUCCACUC | 1880 | | [2972-2990] 3′UTR |
| GGUUGUGGGUCUGGAGGGA | 1266 | UCCCUCCAGACCCACAACC | 1881 | Rh | [1124-1142] 3′UTR |
| GUUGAUUUUGUUUCCGUUU | 1267 | AAACGGAAACAAAAUCAAC | 1882 | | [3454-3472] 3′UTR |
| CACUGUGUUUAUGCUGGAA | 1268 | UUCCAGCAUAAACACAGUG | 1883 | | [3493-3511] 3′UTR |
| GAGCUGCGUUCCAGCCUCA | 1269 | UGAGGCUGGAACGCAGCUC | 1884 | | [1645-1663] 3′UTR |
| GGACUGGGUCACAGAGAAG | 1270 | CUUCUCUGUGACCCAGUCC | 1885 | Rh, Rt, Ms, Pg | [826-844] ORF |
| AGCUAAGCAUAGUAAGAAG | 1271 | CUUCUUACUAUGCUUAGCU | 1886 | | [2032-2050] 3′UTR |
| CACAAGAGUUGUUGAAAGU | 1272 | ACUUUCAACAACUCUUGUG | 1887 | | [3545-3563] 3′UTR |
| GGUCAGCACAGAUCUUGAU | 1273 | AUCAAGAUCUGUGCUGACC | 1888 | Rh | [2586-2604] 3′UTR |
| UUCUAAAGGUGAAUUCUCA | 1274 | UGAGAAUUCACCUUUAGAA | 1889 | | [2158-2176] 3′UTR |
| AGGGAACUAGGGAACCUAU | 1275 | AUAGGUUCCCUAGUUCCCU | 1890 | Rh | [2263-2281] 3′UTR |
| GGAAGUGGACUCUGGAAAC | 1276 | GUUUCCAGAGUCCACUUCC | 1891 | | [460-478] ORF |
| CCUCCCACCUGUGUUGUAA | 1277 | UUACAACACAGGUGGGAGG | 1892 | Rh | [2373-2391] 3′UTR |
| CGGACGAGUGCCUCUGGAU | 1278 | AUCCAGAGGCACUCGUCCG | 1893 | Rh, Rb, Cw | [807-825] ORF |
| CGUGGAAGCAUUUGACCCA | 1279 | UGGGUCAAAUGCUUCCACG | 1894 | Rh | [2953-2971] 3′UTR |
| GCACUGUGUUUAUGCUGGA | 1280 | UCCAGCAUAAACACAGUGC | 1895 | | [3492-3510] 3′UTR |
| AGUUGCAGAUAUACCAACU | 1281 | AGUUGGUAUAUCUGCAACU | 1896 | Rh | [2194-2212] 3′UTR |
| AAUGAUAAGGAGAAUCUCU | 1282 | AGAGAUUCUCCUUAUCAUU | 1897 | | [2349-2367] 3′UTR |
| CUUGCUGCCGUAAUUUAAA | 1283 | UUUAAAUUACGGCAGCAAG | 1898 | | [3430-3448] 3′UTR |
| GGAGAAUCUCUUGUUUCCU | 1284 | AGGAAACAAGAGAUUCUCC | 1899 | | [2357-2375] 3′UTR |
| CCUUGGUAGGUAUUAGACU | 1285 | AGUCUAAUACCUACCAAGG | 1900 | | [2905-2923] 3′UTR |
| GGACGUUGGAGGAAAGAAG | 1286 | CUUCUUUCCUCCAACGUCC | 1901 | Rt, Ms | [607-625] ORF |
| CGUUGGAGGAAAGAAGGAA | 1287 | UUCCUUCUUUCCUCCAACG | 1902 | Rt, Ms | [610-628] ORF |
| CUGACAUCCCUUCCUGGAA | 1288 | UUCCAGGAAGGGAUGUCAG | 1903 | Rh, Rt, Ms | [1031-1049] 3′UTR |
| UGACAUCCCUUCCUGGAAA | 1289 | UUUCCAGGAAGGGAUGUCA | 1904 | Rh, Rt, Ms | [1032-1050] 3′UTR |
| GAUAUACCAACUUCUGCUU | 1290 | AAGCAGAAGUUGGUAUAUC | 1905 | Rh | [2201-2219] 3′UTR |
| AGAUGGGCUGCGAGUGCAA | 1291 | UUGCACUCGCAGCCCAUCU | 1906 | Ck, Rb, Rt | [747-765] ORF |
| GGCUUAGUGUUCCCUCCCU | 1292 | AGGGAGGGAACACUAAGCC | 1907 | | [1964-1982] 3′UTR |
| GUAUGGUGAUAUCAUAUGU | 1293 | ACAUAUGAUAUCACCAUAC | 1908 | | [2792-2810] 3′UTR |
| ACCAACUUCUGCUUGUAUU | 1294 | AAUACAAGCAGAAGUUGGU | 1909 | Rh | [2206-2224] 3′UTR |
| CUCACUUCUUUCUCAGCCU | 1295 | AGGCUGAGAAAGAAGUGAG | 1910 | | [2101-2119] 3′UTR |
| CUCCCACCUGUGUUGUAAA | 1296 | UUUACAACACAGGUGGGAG | 1911 | Rh | [2374-2392] 3′UTR |
| GGGUCUCGCUGGACGUUGG | 1297 | CCAACGUCCAGCGAGACCC | 1912 | Rt, Ms | [597-615] ORF |
| GAGCCUCCCUCUGAGCCUU | 1298 | AAGGCUCAGAGGGAGGCUC | 1913 | Rh | [1598-1616] 3′UTR |
| GCAUGUCUCUGAUGCUUUG | 1299 | CAAAGCAUCAGAGACAUGC | 1914 | | [3579-3597] 3′UTR |
| GGCGUUUUCAUGCUGUACA | 1300 | UGUACAGCAUGAAAACGCC | 1915 | Rh | [2662-2680] 3′UTR |
| AUACCAACUUCUGCUUGUA | 1301 | UACAAGCAGAAGUUGGUAU | 1916 | Rh | [2204-2222] 3′UTR |
| GCAAUGCAGAUGUAGUGAU | 1302 | AUCACUACAUCUGCAUUGC | 1917 | | [417-435] ORF |
| ACUUCUGCUUGUAUUUCUU | 1303 | AAGAAAUACAAGCAGAAGU | 1918 | Rh | [2210-2228] 3′UTR |
| UCCAGUUCAAAUUAUUGCA | 1304 | UGCAAUAAUUUGAACUGGA | 1919 | | [3067-3085] 3′UTR |
| CCUGGUCAGCACAGAUCUU | 1305 | AAGAUCUGUGCUGACCAGG | 1920 | Rh | [2583-2601] 3′UTR |
| UGUUGAUUUUGUUUCCGUU | 1306 | AACGGAAACAAAAUCAACA | 1921 | | [3453-3471] 3′UTR |
| UGCAGAUAUACCAACUUCU | 1307 | AGAAGUUGGUAUAUCUGCA | 1922 | Rh | [2197-2215] 3′UTR |
| GCGGUCAGUGAGAAGGAAG | 1308 | CUUCCUUCUCACUGACCGC | 1923 | | [446-464] ORF |
| GGCGUGGUCUUGCAAAAUG | 1309 | CAUUUUGCAAGACCACGCC | 1924 | | [2463-2481] 3′UTR |
| GUCCAGCCUAGGAAGGGAA | 1310 | UUCCCUUCCUAGGCUGGAC | 1925 | Rh | [2050-2068] 3′UTR |
| ACUUUCUCGGUAAUGAUAA | 1311 | UUAUCAUUACCGAGAAAGU | 1926 | | [2338-2356] 3′UTR |
| CUUCUGCUUGUAUUUCUUA | 1312 | UAAGAAAUACAAGCAGAAG | 1927 | | [2211-2229] 3′UTR |
| CAGAGGAAGCCGCUCAAAU | 1313 | AUUUGAGCGGCUUCCUCUG | 1928 | | [3213-3231] 3′UTR |
| GAAGGAAGUGGACUCUGGA | 1314 | UCCAGAGUCCACUUCCUUC | 1929 | | [457-475] ORF |
| CAGUGAGAAGGAAGUGGAC | 1315 | GUCCACUUCCUUCUCACUG | 1930 | | [451-469] ORF |
| GACUUCCCUUUCUAGGGCA | 1316 | UGCCCUAGAAAGGGAAGUC | 1931 | Rh | [2605-2623] 3′UTR |
| CCUCCCUCUGAGCCUUGUA | 1317 | UACAAGGCUCAGAGGGAGG | 1932 | Rh | [1601-1619] 3′UTR |
| CAUGCUGUACAGUGACCUA | 1318 | UAGGUCACUGUACAGCAUG | 1933 | | [2670-2688] 3′UTR |
| GAGUGCCUCUGGAUGGACU | 1319 | AGUCCAUCCAGAGGCACUC | 1934 | Rh, Rb, Cw, Dg, Rt, Ms | [812-830] ORF |
| CUGGGAGGGUAUCCAGGAA | 1320 | UUCCUGGAUACCCUCCCAG | 1935 | Rh | [2626-2644] 3′UTR |
| AACCGUGCUGAGCAGAAAA | 1321 | UUUUCUGCUCAGCACGGUU | 1936 | | [3160-3178] 3′UTR |
| CAGUCCAUGUGAUUUCAGU | 1322 | ACUGAAAUCACAUGGACUG | 1937 | Rh | [2714-2732] 3′UTR |
| UAGACAUGGUUGUGGGUCU | 1323 | AGACCCACAACCAUGUCUA | 1938 | | [1117-1135] 3′UTR |
| GCGCAUGUCUCUGAUGCUU | 1324 | AAGCAUCAGAGACAUGCGC | 1939 | | [3577-3595] 3′UTR |
| AAGGUGAAUUCUCAGAUGA | 1325 | UCAUCUGAGAAUUCACCUU | 1940 | | [2163-2181] 3′UTR |
| AGAAGAACAUCAACGGGCA | 1326 | UGCCCGUUGAUGUUCUUCU | 1941 | Rh, Rb | [840-858] ORF |
| ACAUACACACGCAAUGAAA | 1327 | UUUCAUUGCGUGUGUAUGU | 1942 | Rh | [2426-2444] 3′UTR |
| CACAGAUCUUGAUGACUUC | 1328 | GAAGUCAUCAAGAUCUGUG | 1943 | Rh | [2592-2610] 3′UTR |
| AGCCGCUCAAAUACCUUCA | 1329 | UGAAGGUAUUUGAGCGGCU | 1944 | | [3220-3238] 3′UTR |
| CCAGUAUGAGAUCAAGCAG | 1330 | CUGCUUGAUCUCAUACUGG | 1945 | Rh, Rb, Cw, Dg, Ms | [508-526] ORF |
| GUGAGAAGGAAGUGGACUC | 1331 | GAGUCCACUUCCUUCUCAC | 1946 | | [453-471] ORF |
| ACCUUAGCCUGUUCUAUUC | 1332 | GAAUAGAACAGGCUAAGGU | 1947 | Rh | [2493-2511] 3′UTR |
| CCUGUUUCUGCUGAUUGUU | 1333 | AACAAUCAGCAGAAACAGG | 1948 | | [2821-2839] 3′UTR |
| GCCAUUGCUUCUUGCCUGU | 1334 | ACAGGCAAGAAGCAAUGGC | 1949 | | [1817-1835] 3′UTR |
| GCCUGGAAAUGUGCAUUUU | 1335 | AAAAUGCACAUUUCCAGGC | 1950 | Rh | [1322-1340] 3′UTR |
| GCACAGCUCUCUUCUCCUA | 1336 | UAGGAGAAGAGAGCUGUGC | 1951 | | [3317-3335] 3′UTR |
| CGACAUUUAUGGCAACCCU | 1337 | AGGGUUGCCAUAAAUGUCG | 1952 | | [478-496] ORF |
| CCUGUGCUGUGUUUUUUAU | 1338 | AUAAAAAACACAGCACAGG | 1953 | Rh | [2883-2901] 3′UTR |
| AGGAAGUGGACUCUGGAAA | 1339 | UUUCCAGAGUCCACUUCCU | 1954 | | [459-477] ORF |
| GCUAAGCAUAGUAAGAAGU | 1340 | ACUUCUUACUAUGCUUAGC | 1955 | | [2033-2051] 3′UTR |
| CCGUCUUUGGUUCUCCAGU | 1341 | ACUGGAGAACCAAAGACGG | 1956 | | [3054-3072] 3′UTR |
| UUUCCUGAAGCCAGUGAUA | 1342 | UAUCACUGGCUUCAGGAAA | 1957 | | [2299-2317] 3′UTR |
| AGACGUGGGUCCAAGGUCC | 1343 | GGACCUUGGACCCACGUCU | 1958 | | [1142-1160] 3′UTR |
| ACAUUUAUGGCAACCCUAU | 1344 | AUAGGGUUGCCAUAAAUGU | 1959 | | [480-498] ORF |
| GUGGACAAUAAACAGUAUU | 1345 | AAUACUGUUUAUUGUCCAC | 1960 | | [3625-3643] 3′UTR |
| GGGAACACACAAGAGUUGU | 1346 | ACAACUCUUGUGUGUUCCC | 1961 | | [3538-3556] 3′UTR |
| GCUCGGUCCGUGGACAAUA | 1347 | UAUUGUCCACGGACCGAGC | 1962 | | [3616-3634] 3′UTR |
| CCGUGCUGAGCAGAAAACA | 1348 | UGUUUUCUGCUCAGCACGG | 1963 | | [3162-3180] 3′UTR |
| CCGCUCAAAUACCUUCACA | 1349 | UGUGAAGGUAUUUGAGCGG | 1964 | | [3222-3240] 3′UTR |
| GUUCCCUCCCUCAAAGACU | 1350 | AGUCUUUGAGGGAGGGAAC | 1965 | | [1972-1990] 3′UTR |
| GGUCGUUGCAAGACUGUGU | 1351 | ACACAGUCUUGCAACGACC | 1966 | | [1356-1374] 3′UTR |
| GGUGCUGGGAACACACAAG | 1352 | CUUGUGUGUUCCCAGCACC | 1967 | | [3532-3550] 3′UTR |
| AGUAUAUACAACUCCACCA | 1353 | UGGUGGAGUUGUAUAUACU | 1968 | Rh | [2730-2748] 3′UTR |
| GGCAUCAGGCACCUGGAUU | 1354 | AAUCCAGGUGCCUGAUGCC | 1969 | | [1839-1857] 3′UTR |
| AGCAGAUAAAGAUGUUCAA | 1355 | UUGAACAUCUUUAUCUGCU | 1970 | Cw, Dg, Rt, Ms, Pg | [522-540] ORF |
| UGGAAUAUGAAGUCUGAGA | 1356 | UCUCAGACUUCAUAUUCCA | 1971 | Ms | [3507-3525] 3′UTR |
| CAGGCACCUGGAUUGAGUU | 1357 | AACUCAAUCCAGGUGCCUG | 1972 | Rh | [1844-1862] 3′UTR |
| AUAAGGAGAAUCUCUUGUU | 1358 | AACAAGAGAUUCUCCUUAU | 1973 | | [2353-2371] 3′UTR |
| GCCUGUUUUAAGAGACAUC | 1359 | GAUGUCUCUUAAAACAGGC | 1974 | Rh | [2133-2151] 3′UTR |
| CGCUUCCUGUAUGGUGAUA | 1360 | UAUCACCAUACAGGAAGCG | 1975 | | [2784-2802] 3′UTR |
| GCACCGUCACAGAUGCCAA | 1361 | UUGGCAUCUGUGACGGUGC | 1976 | | [1262-1280] 3′UTR |
| GUUCCAGCCUCAGCUGAGU | 1362 | ACUCAGCUGAGGCUGGAAC | 1977 | | [1652-1670] 3′UTR |
| GGAGGUAGGUGGCUUUGGU | 1363 | ACCAAAGCCACCUACCUCC | 1978 | Rh | [2076-2094] 3′UTR |
| GGAAACGACAUUUAUGGCA | 1364 | UGCCAUAAAUGUCGUUUCC | 1979 | | [473-491] ORF |
| GCAAGAUGCACAUCACCCU | 1365 | AGGGUGAUGUGCAUCUUGC | 1980 | Rh, Dg | [660-678] ORF |
| UGUAGAAAUGGGAGCGAGA | 1366 | UCUCGCUCCCAUUUCUACA | 1981 | Rh | [1616-1634] 3′UTR |
| GGCCUAUGCAGGUGGAUUC | 1367 | GAAUCCACCUGCAUAGGCC | 1982 | Rh | [2985-3003] 3′UTR |
| AAGAAGAGCCUGAACCACA | 1368 | UGUGGUUCAGGCUCUUCUU | 1983 | Rh, Rb, Cw, Ms, Pg | [722-740] ORF |
| GGGAGGGUAUCCAGGAAUC | 1369 | GAUUCCUGGAUACCCUCCC | 1984 | Rh | [2628-2646] 3′UTR |
| GUCAUAAUGGACCAGUCCA | 1370 | UGGACUGGUCCAUUAUGAC | 1985 | Rh | [2702-2720] 3′UTR |
| CCAAGGUCCUCAUCCCAUC | 1371 | GAUGGGAUGAGGACCUUGG | 1986 | | [1152-1170] 3′UTR |
| AGGUGGCUUUGGUGACACA | 1372 | UGUGUCACCAAAGCCACCU | 1987 | Rh | [2082-2100] 3′UTR |
| AGACUGUGUAGCAGGCCUA | 1373 | UAGGCCUGCUACACAGUCU | 1988 | Rh | [1366-1384] 3′UTR |
| GGCCUGGAAAUGUGCAUUU | 1374 | AAAUGCACAUUUCCAGGCC | 1989 | Rh | [1321-1339] 3′UTR |
| GGUUAGGAUAGGAAGAACU | 1375 | AGUUCUUCCUAUCCUAACC | 1990 | | [2322-2340] 3′UTR |
| GGCUAGUUCUUGAAGGAGC | 1376 | GCUCCUUCAAGAACUAGCC | 1991 | | [1544-1562] 3′UTR |
| AGCUCUGUUGAUUUUGUUU | 1377 | AAACAAAAUCAACAGAGCU | 1992 | | [3448-3466] 3′UTR |
| UGCAUUUUGCAGAAACUUU | 1378 | AAAGUUUCUGCAAAAUGCA | 1993 | Rh | [1333-1351] 3′UTR |
| GUCUGAAAGGUGUGGCCUU | 1379 | AAGGCCACACCUUUCAGAC | 1994 | | [3112-3130] 3′UTR |
| CAUCCAAGGGCAGCCUGGA | 1380 | UCCAGGCUGCCCUUGGAUG | 1995 | | [1519-1537] 3′UTR |
| UGUUUCUGCUGAUUGUUUU | 1381 | AAAACAAUCAGCAGAAACA | 1996 | | [2823-2841] 3′UTR |
| UGCAAGCAACUCAAAAUAU | 1382 | AUAUUUUGAGUUGCUUGCA | 1997 | | [3345-3363] 3′UTR |
| AACAUUUACUCCUGUUUCU | 1383 | AGAAACAGGAGUAAAUGUU | 1998 | Rh | [2811-2829] 3′UTR |
| GAAAGGUGUGGCCUUUAUA | 1384 | UAUAAAGGCCACACCUUUC | 1999 | | [3116-3134] 3′UTR |
| UCCUGUUUCUGCUGAUUGU | 1385 | ACAAUCAGCAGAAACAGGA | 2000 | | [2820-2838] 3′UTR |
| AUCCUAUUAAUCCUCAGAA | 1386 | UUCUGAGGAUUAAUAGGAU | 2001 | Rh | [1570-1588] 3′UTR |
| UCCUGAAGCCAGUGAUAUG | 1387 | CAUAUCACUGGCUUCAGGA | 2002 | | [2301-2319] 3′UTR |
| AGGGCCUGAGAAGGAUAUA | 1388 | UAUAUCCUUCUCAGGCCCU | 2003 | | [541-559] ORF |
| GUUGCAGAUAUACCAACUU | 1389 | AAGUUGGUAUAUCUGCAAC | 2004 | Rh | [2195-2213] 3′UTR |
| GGGCCUGAGAAGGAUAUAG | 1390 | CUAUAUCCUUCUCAGGCCC | 2005 | | [542-560] ORF |
| CGGGCGUUUUCAUGCUGUA | 1391 | UACAGCAUGAAAACGCCCG | 2006 | Rh | [2660-2678] 3′UTR |
| ACCAGUCCAUGUGAUUUCA | 1392 | UGAAAUCACAUGGACUGGU | 2007 | Rh | [2712-2730] 3′UTR |
| CGUGGGUCCAAGGUCCUCA | 1393 | UGAGGACCUUGGACCCACG | 2008 | | [1145-1163] 3′UTR |
| GCCUGGAACCAGUGGCUAG | 1394 | CUAGCCACUGGUUCCAGGC | 2009 | | [1531-1549] 3′UTR |
| CCUUUCAUCUUGAGAGGGA | 1395 | UCCCUCUCAAGAUGAAAGG | 2010 | Rh | [1392-1410] 3′UTR |
| CCAGUGGGAGCCUCCCUCU | 1396 | AGAGGGAGGCUCCCACUGG | 2011 | Rh | [1591-1609] 3′UTR |
| AAAUGUGCAUUUUGCAGAA | 1397 | UUCUGCAAAAUGCACAUUU | 2012 | Rh, Ms | [1328-1346] 3′UTR |
| UGGUCAGCACAGAUCUUGA | 1398 | UCAAGAUCUGUGCUGACCA | 2013 | Rh | [2585-2603] 3′UTR |
| CUAUGCAGGUGGAUUCCUU | 1399 | AAGGAAUCCACCUGCAUAG | 2014 | Rh | [2988-3006] 3′UTR |
| AGUAAGAAGUCCAGCCUAG | 1400 | CUAGGCUGGACUUCUUACU | 2015 | Rh | [2042-2060] 3′UTR |
| CUCAUCCCAUGGGUCCAAA | 1401 | UUUGGACCCAUGGGAUGAG | 2016 | | [1067-1085] 3′UTR |
| AGAGCCGGGUGGCAGCUGA | 1402 | UCAGCUGCCACCCGGCUCU | 2017 | | [3194-3212] 3′UTR |
| GCUGGGAACACACAAGAGU | 1403 | ACUCUUGUGUGUUCCCAGC | 2018 | | [3535-3553] 3′UTR |
| CCGGACGAGUGCCUCUGGA | 1404 | UCCAGAGGCACUCGUCCGG | 2019 | Rh, Rb, Cw | [806-824] ORF |
| CCCUCAGUGUGGUUUCCUG | 1405 | CAGGAAACCACACUGAGGG | 2020 | | [2287-2305] 3′UTR |
| AGUUGCACAGCUUUGCUUU | 1406 | AAAGCAAAGCUGUGCAACU | 2021 | | [1859-1877] 3′UTR |
| CCCAUAAGCAGGCCUCCAA | 1407 | UUGGAGGCCUGCUUAUGGG | 2022 | | [958-976] |
| | | | | | ORF + 3′UTR |
| CGGUGCUGGGAACACACAA | 1408 | UUGUGUGUUCCCAGCACCG | 2023 | | [3531-3549] 3′UTR |
| GGUUUGUUUUUGACAUCAG | 1409 | CUGAUGUCAAAAACAAACC | 2024 | Rh | [2853-2871] 3′UTR |
| GACGAUAUACAGGCACAUU | 1410 | AAUGUGCCUGUAUAUCGUC | 2025 | | [2401-2419] 3′UTR |
| CUUAGUGUUCCCUCCCUCA | 1411 | UGAGGGAGGGAACACUAAG | 2026 | | [1966-1984] 3′UTR |
| GACACACUCACUUCUUUCU | 1412 | AGAAAGAAGUGAGUGUGUC | 2027 | | [2095-2113] 3′UTR |
| GAAGCCGCUCAAAUACCUU | 1413 | AAGGUAUUUGAGCGGCUUC | 2028 | | [3218-3236] 3′UTR |
| GGUCCCUUUCAUCUUGAGA | 1414 | UCUCAAGAUGAAAGGGACC | 2029 | Rh | [1388-1406] 3′UTR |
| CCUGGAACCAGUGGCUAGU | 1415 | ACUAGCCACUGGUUCCAGG | 2030 | | [1532-1550] 3′UTR |
| UUCAGUAUAUACAACUCCA | 1416 | UGGAGUUGUAUAUACUGAA | 2031 | Rh | [2727-2745] 3′UTR |
| ACCUAUGUGUUCCCUCAGU | 1417 | ACUGAGGGAACACAUAGGU | 2032 | | [2276-2294] 3′UTR |
| CUCCUAUUUUCAUCCUGCA | 1418 | UGCAGGAUGAAAAUAGGAG | 2033 | | [3330-3348] 3′UTR |
| ACACACAAGAGUUGUUGAA | 1419 | UUCAACAACUCUUGUGUGU | 2034 | | [3542-3560] 3′UTR |
| UGUCUCUGAUGCUUUGUAU | 1420 | AUACAAAGCAUCAGAGACA | 2035 | | [3582-3600] 3′UTR |
| UAGAAAUGGGAGCGAGAAA | 1421 | UUUCUCGCUCCCAUUUCUA | 2036 | | [1618-1636] 3′UTR |
| GAAGCAUUUGACCCAGAGU | 1422 | ACUCUGGGUCAAAUGCUUC | 2037 | | [2957-2975] 3′UTR |
| GUUUUUGACAUCAGCUGUA | 1423 | UACAGCUGAUGUCAAAAAC | 2038 | | [2858-2876] 3′UTR |
| GGAGUUUCUCGACAUCGAG | 1424 | CUCGAUGUCGAGAAACUCC | 2039 | Ck, Dg | [937-955] ORF |
| GAUAAACUGACGAUAUACA | 1425 | UGUAUAUCGUCAGUUUAUC | 2040 | | [2393-2411] 3′UTR |
| GUGUUCCCUCCCUCAAAGA | 1426 | UCUUUGAGGGAGGGAACAC | 2041 | | [1970-1988] 3′UTR |
| UUUGUUUCCGUUUGGAUUU | 1427 | AAAUCCAAACGGAAACAAA | 2042 | | [3460-3478] 3′UTR |
| AGCUGAGUCUUUUUGGUCU | 1428 | AGACCAAAAAGACUCAGCU | 2043 | Rh | [1663-1681] 3′UTR |
| AACUUUCUCGGUAAUGAUA | 1429 | UAUCAUUACCGAGAAAGUU | 2044 | | [2337-2355] 3′UTR |
| CCGGGUGGCAGCUGACAGA | 1430 | UCUGUCAGCUGCCACCCGG | 2045 | | [3198-3216] 3′UTR |
| GAGUUGCACAGCUUUGCUU | 1431 | AAGCAAAGCUGUGCAACUC | 2046 | | [1858-1876] 3′UTR |
| CCGGGACCUGGUCAGCACA | 1432 | UGUGCUGACCAGGUCCCGG | 2047 | Rh | [2577-2595] 3′UTR |
| CAAAGUAAAGGAUCUUUGA | 1433 | UCAAAGAUCCUUUACUUUG | 2048 | | [3084-3102] 3′UTR |
| CAGCUCUCUUCUCCUAUUU | 1434 | AAAUAGGAGAAGAGAGCUG | 2049 | | [3320-3338] 3′UTR |
| GACAGAAAAAGCUGGGUCU | 1435 | AGACCCAGCUUUUUCUGUC | 2050 | Rh | [1930-1948] 3′UTR |
| UGCAUGUGACGCCAGCUAA | 1436 | UUAGCUGGCGUCACAUGCA | 2051 | | [2019-2037] 3′UTR |
| CCAGCCUCAGCUGAGUCUU | 1437 | AAGACUCAGCUGAGGCUGG | 2052 | Rh | [1655-1673] 3′UTR |
| GACCUAAAGUUGGUAAGAU | 1438 | AUCUUACCAACUUUAGGUC | 2053 | | [2683-2701] 3′UTR |
| GGUGUGGCCUUUAUAUUUG | 1439 | CAAAUAUAAAGGCCACACC | 2054 | | [3120-3138] 3′UTR |
| GUCCAAGGUCCUCAUCCCA | 1440 | UGGGAUGAGGACCUUGGAC | 2055 | | [1150-1168] 3′UTR |
| UAGUAAGAAGUCCAGCCUA | 1441 | UAGGCUGGACUUCUUACUA | 2056 | Rh | [2041-2059] 3′UTR |
| AAGCAUAGUAAGAAGUCCA | 1442 | UGGACUUCUUACUAUGCUU | 2057 | | [2036-2054] 3′UTR |
| AGGAUAGGAAGAACUUUCU | 1443 | AGAAAGUUCUUCCUAUCCU | 2058 | | [2326-2344] 3′UTR |
| AGGAGAAUCUCUUGUUUCC | 1444 | GGAAACAAGAGAUUCUCCU | 2059 | | [2356-2374] 3′UTR |
| CAAGAGUUGUUGAAAGUUG | 1445 | CAACUUUCAACAACUCUUG | 2060 | | [3547-3565] 3′UTR |
| CCCAUGAUCCCGUGCUACA | 1446 | UGUAGCACGGGAUCAUGGG | 2061 | Rh, Rb | [779-797] ORF |
| CAUCCCAUGGGUCCAAAUU | 1447 | AAUUUGGACCCAUGGGAUG | 2062 | | [1069-1087] 3′UTR |
| CUGAGCAGAAAACAAAACA | 1448 | UGUUUUGUUUUCUGCUCAG | 2063 | | [3167-3185] 3′UTR |
| AGCAGAAAACAAAACAGGU | 1449 | ACCUGUUUUGUUUUCUGCU | 2064 | | [3170-3188] 3′UTR |
| CUUGUUUCCUCCCACCUGU | 1450 | ACAGGUGGGAGGAAACAAG | 2065 | | [2366-2384] 3′UTR |
| GUGGACUCUGGAAACGACA | 1451 | UGUCGUUUCCAGAGUCCAC | 2066 | Rh | [464-482] ORF |
| UGAUAAGGAGAAUCUCUUG | 1452 | CAAGAGAUUCUCCUUAUCA | 2067 | Rh | [2351-2369] 3′UTR |
| UGAGUAGGUUCGGUCUGAA | 1453 | UUCAGACCGAACCUACUCA | 2068 | | [3100-3118] 3′UTR |
| CAUUUGGCAUCGUUUAAUU | 1454 | AAUUAAACGAUGCCAAAUG | 2069 | | [3281-3299] 3′UTR |
| GCUUCCUGUAUGGUGAUAU | 1455 | AUAUCACCAUACAGGAAGC | 2070 | | [2785-2803] 3′UTR |
| GAGGAUCCAGUAUGAGAUC | 1456 | GAUCUCAUACUGGAUCCUC | 2071 | Rh, Rb | [502-520] ORF |
| GCACAUCCUGAGGACAGAA | 1457 | UUCUGUCCUCAGGAUGUGC | 2072 | Rh | [1918-1936] 3′UTR |
| GCAUGAAUAAAACACUCAU | 1458 | AUGAGUGUUUUAUUCAUGC | 2073 | Rh | [1053-1071] 3′UTR |
| GCAACAGGCGUUUUGCAAU | 1459 | AUUGCAAAACGCCUGUUGC | 2074 | Cw, Rt, Ms | [403-421] ORF |
| GGGACGGCAAGAUGCACAU | 1460 | AUGUGCAUCUUGCCGUCCC | 2075 | | [654-672] ORF |
| CUGUAAUCAUUCCUGUGCU | 1461 | AGCACAGGAAUGAUUACAG | 2076 | Rh | [2872-2890] 3′UTR |
| GGUCUUUUAACCGUGCUGA | 1462 | UCAGCACGGUUAAAAGACC | 2077 | | [3152-3170] 3′UTR |
| ACAGCUCUCUUCUCCUAUU | 1463 | AAUAGGAGAAGAGAGCUGU | 2078 | | [3319-3337] 3′UTR |
| ACCCUUGGUAGGUAUUAGA | 1464 | UCUAAUACCUACCAAGGGU | 2079 | | [2903-2921] 3′UTR |
| GACUGGUCCAGCUCUGACA | 1465 | UGUCAGAGCUGGACCAGUC | 2080 | Rh | [1018-1036] 3′UTR |
| AUCCUGCAAGCAACUCAAA | 1466 | UUUGAGUUGCUUGCAGGAU | 2081 | | [3341-3359] 3′UTR |
| CCAUGAUCCCGUGCUACAU | 1467 | AUGUAGCACGGGAUCAUGG | 2082 | Rh, Rb | [780-798] ORF |
| UUGUAUCAUUCUUGAGCAA | 1468 | UUGCUCAAGAAUGAUACAA | 2083 | | [3595-3613] 3′UTR |
| GAGUCUUUUUGGUCUGCAC | 1469 | GUGCAGACCAAAAAGACUC | 2084 | | [1667-1685] 3′UTR |
| GUUCAAAGGGCCUGAGAAG | 1470 | CUUCUCAGGCCCUUUGAAC | 2085 | | [535-553] ORF |
| AGCCUCAGCUGAGUCUUUU | 1471 | AAAAGACUCAGCUGAGGCU | 2086 | Rh | [1657-1675] 3′UTR |
| GAUAAGGAGAAUCUCUUGU | 1472 | ACAAGAGAUUCUCCUUAUC | 2087 | | [2352-2370] 3′UTR |
| ACAUCACCCUCUGUGACUU | 1473 | AAGUCACAGAGGGUGAUGU | 2088 | Rh | [669-687] ORF |
| GCGUGGUCUUGCAAAAUGC | 1474 | GCAUUUUGCAAGACCACGC | 2089 | | [2464-2482] 3′UTR |
| GCCUUGGCACCGUCACAGA | 1475 | UCUGUGACGGUGCCAAGGC | 2090 | Rh | [1256-1274] 3′UTR |
| AGAAGAGCCUGAACCACAG | 1476 | CUGUGGUUCAGGCUCUUCU | 2091 | Rh, Rb, Cw, Ms, Pg | [723-741] ORF |
| UGGCCUGUUUUAAGAGACA | 1477 | UGUCUCUUAAAACAGGCCA | 2092 | Rh | [2131-2149] 3′UTR |
| GGGAAGGAUUUUGGAGGUA | 1478 | UACCUCCAAAAUCCUUCCC | 2093 | Rh | [2064-2082] 3′UTR |
| CCCUGUGGCCAACUGCAAA | 1479 | UUUGCAGUUGGCCACAGGG | 2094 | Rh | [980-998] 3′UTR |
| CUUUCUCGGUAAUGAUAAG | 1480 | CUUAUCAUUACCGAGAAAG | 2095 | | [2339-2357] 3′UTR |
| CACUCAUCCCAUGGGUCCA | 1481 | UGGACCCAUGGGAUGAGUG | 2096 | | [1065-1083] 3′UTR |
| GGUGGCAGCUGACAGAGGA | 1482 | UCCUCUGUCAGCUGCCACC | 2097 | | [3201-3219] 3′UTR |
| GUGAAUUCUCAGAUGAUAG | 1483 | CUAUCAUCUGAGAAUUCAC | 2098 | | [2166-2184] 3′UTR |
| UCCUGCAAGCAACUCAAAA | 1484 | UUUUGAGUUGCUUGCAGGA | 2099 | | [3342-3360] 3′UTR |
| CCUGUUUUAAGAGACAUCU | 1485 | AGAUGUCUCUUAAAACAGG | 2100 | Rh | [2134-2152] 3′UTR |
| GGGCAGCCUGGAACCAGUG | 1486 | CACUGGUUCCAGGCUGCCC | 2101 | | [1526-1544] 3′UTR |
| GCAUCAGGCACCUGGAUUG | 1487 | CAAUCCAGGUGCCUGAUGC | 2102 | | [1840-1858] 3′UTR |
| AGCCUGGAACCAGUGGCUA | 1488 | UAGCCACUGGUUCCAGGCU | 2103 | | [1530-1548] 3′UTR |
| UGCACAUCACCCUCUGUGA | 1489 | UCACAGAGGGUGAUGUGCA | 2104 | Rh | [666-684] ORF |
| AGAUAUACCAACUUCUGCU | 1490 | AGCAGAAGUUGGUAUAUCU | 2105 | Rh | [2200-2218] 3′UTR |
| CUAGCUAAGAAACUUCCUA | 1491 | UAGGAAGUUUCUUAGCUAG | 2106 | | [2245-2263] 3′UTR |
| CUCUCUUCUCCUAUUUUCA | 1492 | UGAAAAUAGGAGAAGAGAG | 2107 | | [3323-3341] 3′UTR |
| AUCCAAGGGCAGCCUGGAA | 1493 | UUCCAGGCUGCCCUUGGAU | 2108 | | [1520-1538] 3′UTR |
| AAAGGAUCUUUGAGUAGGU | 1494 | ACCUACUCAAAGAUCCUUU | 2109 | | [3090-3108] 3′UTR |
| CUGAGCACCACCCAGAAGA | 1495 | UCUUCUGGGUGGUGCUCAG | 2110 | Rh, Pg | [707-725] ORF |
| CCUGUUCUGGCAUCAGGCA | 1496 | UGCCUGAUGCCAGAACAGG | 2111 | | [1831-1849] 3′UTR |
| UGUGUUUAUGCUGGAAUAU | 1497 | AUAUUCCAGCAUAAACACA | 2112 | | [3496-3514] 3′UTR |
| AGGAAGAACUUUCUCGGUA | 1498 | UACCGAGAAAGUUCUUCCU | 2113 | Rh | [2331-2349] 3′UTR |
| AGAGCCUGAACCACAGGUA | 1499 | UACCUGUGGUUCAGGCUCU | 2114 | Rh, Rb, Cw, Ms, Pg | [726-744] ORF |
| GCCAAGCAGGCAGCACUUA | 1500 | UAAGUGCUGCCUGCUUGGC | 2115 | | [1276-1294] 3′UTR |
| GGGCUUUCUGCAUGUGACG | 1501 | CGUCACAUGCAGAAAGCCC | 2116 | | [2011-2029] 3′UTR |
| ACCCAGAAGAAGAGCCUGA | 1502 | UCAGGCUCUUCUUCUGGGU | 2117 | Rh, Cw, Ms, Pg | [716-734] ORF |
| CGCCUGCAUCAAGAGAAGU | 1503 | ACUUCUCUUGAUGCAGGCG | 2118 | Rh, Cw, Dg, Rt, Ms | [874-892] ORF |
| GCAGAUAUACCAACUUCUG | 1504 | CAGAAGUUGGUAUAUCUGC | 2119 | Rh | [2198-2216] 3′UTR |
| UGGACCAGUCCAUGUGAUU | 1505 | AAUCACAUGGACUGGUCCA | 2120 | Rh | [2709-2727] 3′UTR |
| UGUAACAUUUACUCCUGUU | 1506 | AACAGGAGUAAAUGUUACA | 2121 | Rh | [2808-2826] 3′UTR |
| CAGCUGUAAUCAUUCCUGU | 1507 | ACAGGAAUGAUUACAGCUG | 2122 | | [2869-2887] 3′UTR |
| GAGUUGUUGAAAGUUGACA | 1508 | UGUCAACUUUCAACAACUC | 2123 | | [3550-3568] 3′UTR |
| AGACUGCGCAUGUCUCUGA | 1509 | UCAGAGACAUGCGCAGUCU | 2124 | | [3572-3590] 3′UTR |
| UCCUGUGCUGUGUUUUUUA | 1510 | UAAAAAACACAGCACAGGA | 2125 | Rh | [2882-2900] 3′UTR |
| CCUUCUCCUUUUAGACAUG | 1511 | CAUGUCUAAAAGGAGAAGG | 2126 | | [1106-1124] 3′UTR |
| CUAAGAAACUUCCUAGGGA | 1512 | UCCCUAGGAAGUUUCUUAG | 2127 | | [2249-2267] 3′UTR |
| GCCAAGUUCUUCGCCUGCA | 1513 | UGCAGGCGAAGAACUUGGC | 2128 | Rh, Rb, Cw, Dg, Ms | [863-881] ORF |
| GCUGGACGUUGGAGGAAAG | 1514 | CUUUCCUCCAACGUCCAGC | 2129 | Rt, Ms | [604-622] ORF |
| AGGCGUUUUGCAAUGCAGA | 1515 | UCUGCAUUGCAAAACGCCU | 2130 | Cw, Rt, Ms | [408-426] ORF |
| UGUGCAUUUUGCAGAAACU | 1516 | AGUUUCUGCAAAAUGCACA | 2131 | Rh, Rt, Ms | [1331-1349] 3′UTR |
| CAGCCUGGAACCAGUGGCU | 1517 | AGCCACUGGUUCCAGGCUG | 2132 | | [1529-1547] 3′UTR |
| GCAAAAAAAGCCUCCAAGG | 1518 | CCUUGGAGGCUUUUUUUGC | 2133 | | [994-1012] 3′UTR |
| ACCUGGAUUGAGUUGCACA | 1519 | UGUGCAACUCAAUCCAGGU | 2134 | | [1849-1867] 3′UTR |
| CGUAAUUUAAAGCUCUGUU | 1520 | AACAGAGCUUUAAAUUACG | 2135 | | [3438-3456] 3′UTR |
| CUGUGCUGUGUUUUUUAUU | 1521 | AAUAAAAAACACAGCACAG | 2136 | Rh | [2884-2902] 3′UTR |
| GGCACCAGGCCAAGUUCUU | 1522 | AAGAACUUGGCCUGGUGCC | 2137 | Rh, Rb, Rt, Ms | [855-873] ORF |
| CCUGUGGCCAACUGCAAAA | 1523 | UUUUGCAGUUGGCCACAGG | 2138 | Rh | [981-999] 3′UTR |
| GGUUUCGACUGGUCCAGCU | 1524 | AGCUGGACCAGUCGAAACC | 2139 | Rh | [1012-1030] 3′UTR |
| GAAUAAAACACUCAUCCCA | 1525 | UGGGAUGAGUGUUUUAUUC | 2140 | Rh | [1057-1075] 3′UTR |
| GAGUUGCAGAUAUACCAAC | 1526 | GUUGGUAUAUCUGCAACUC | 2141 | Rh | [2193-2211] 3′UTR |
| CUUCCUGUAUGGUGAUAUC | 1527 | GAUAUCACCAUACAGGAAG | 2142 | | [2786-2804] 3′UTR |
| UUUGGUUCUCCAGUUCAAA | 1528 | UUUGAACUGGAGAACCAAA | 2143 | | [3059-3077] 3′UTR |
| GCCUGCAUCAAGAGAAGUG | 1529 | CACUUCUCUUGAUGCAGGC | 2144 | Rt, Ms | [875-893] ORF |
| GGCAACCCUAUCAAGAGGA | 1530 | UCCUCUUGAUAGGGUUGCC | 2145 | | [488-506] ORF |
| AAGCGGUCAGUGAGAAGGA | 1531 | UCCUUCUCACUGACCGCUU | 2146 | | [444-462] ORF |
| GUGGCUUUGGUGACACACU | 1532 | AGUGUGUCACCAAAGCCAC | 2147 | | [2084-2102] 3′UTR |
| AGAUCUUGAUGACUUCCCU | 1533 | AGGGAAGUCAUCAAGAUCU | 2148 | Rh | [2595-2613] 3′UTR |
| GAGACGUGGGUCCAAGGUC | 1534 | GACCUUGGACCCACGUCUC | 2149 | | [1141-1159] 3′UTR |
| UGACAUCAGCUGUAAUCAU | 1535 | AUGAUUACAGCUGAUGUCA | 2150 | | [2863-2881] 3′UTR |
| GGGAUCUCCCAGCUGGGUU | 1536 | AACCCAGCUGGGAGAUCCC | 2151 | | [1295-1313] 3′UTR |
| AGCACUUAGGGAUCUCCCA | 1537 | UGGGAGAUCCCUAAGUGCU | 2152 | Rh | [1287-1305] 3′UTR |
| GUCUUUGGUUCUCCAGUUC | 1538 | GAACUGGAGAACCAAAGAC | 2153 | | [3056-3074] 3′UTR |
| UAACCGUGCUGAGCAGAAA | 1539 | UUUCUGCUCAGCACGGUUA | 2154 | | [3159-3177] 3′UTR |
| CUGGAUGGACUGGGUCACA | 1540 | UGUGACCCAGUCCAUCCAG | 2155 | Rh, Rb, Cw, Dg, | [820-838] ORF |
| | | | | Rt, Ms, Pg | |
| GUGCUGGGAACACACAAGA | 1541 | UCUUGUGUGUUCCCAGCAC | 2156 | | [3533-3551] 3′UTR |
| AGUGGGAGCCUCCCUCUGA | 1542 | UCAGAGGGAGGCUCCCACU | 2157 | Rh | [1593-1611] 3′UTR |
| GCAGGCAGCACUUAGGGAU | 1543 | AUCCCUAAGUGCUGCCUGC | 2158 | Rh | [1281-1299] 3′UTR |
| UAUUGGACUUGCUGCCGUA | 1544 | UACGGCAGCAAGUCCAAUA | 2159 | | [3423-3441] 3′UTR |
| GAUCUUGAUGACUUCCCUU | 1545 | AAGGGAAGUCAUCAAGAUC | 2160 | Rh | [2596-2614] 3′UTR |
| ACGCCAGCUAAGCAUAGUA | 1546 | UACUAUGCUUAGCUGGCGU | 2161 | | [2027-2045] 3′UTR |
| AGGACACUAUGGCCUGUUU | 1547 | AAACAGGCCAUAGUGUCCU | 2162 | | [2122-2140] 3′UTR |
| GCCUGAACCACAGGUACCA | 1548 | UGGUACCUGUGGUUCAGGC | 2163 | Rh, Rb, Cw, Ms, Pg | [729-747] ORF |
| UGGUUUGUUUUUGACAUCA | 1549 | UGAUGUCAAAAACAAACCA | 2164 | Rh | [2852-2870] 3′UTR |
| GUGGCAGCUGACAGAGGAA | 1550 | UUCCUCUGUCAGCUGCCAC | 2165 | | [3202-3220] 3′UTR |
| CCAUCAAUCCUAUUAAUCC | 1551 | GGAUUAAUAGGAUUGAUGG | 2166 | Rh | [1564-1582] 3′UTR |
| GGACACUAUGGCCUGUUUU | 1552 | AAAACAGGCCAUAGUGUCC | 2167 | | [2123-2141] 3′UTR |
| GACCUUCCGGUGCUGGGAA | 1553 | UUCCCAGCACCGGAAGGUC | 2168 | | [3524-3542] 3′UTR |
| ACAUCCUGAGGACAGAAAA | 1554 | UUUUCUGUCCUCAGGAUGU | 2169 | Rh | [1920-1938] 3′UTR |
| AUGUAAACAUACACACGCA | 1555 | UGCGUGUGUAUGUUUACAU | 2170 | Rh | [2420-2438] 3 ′UTR |
| GCCUCCAAGGGUUUCGACU | 1556 | AGUCGAAACCCUUGGAGGC | 2171 | Rh | [1003-1021] 3′UTR |
| CUGCAUCAAGAGAAGUGAC | 1557 | GUCACUUCUCUUGAUGCAG | 2172 | Rt, Ms | [877-895] ORF |
| UGGAAGCAUUUGACCCAGA | 1558 | UCUGGGUCAAAUGCUUCCA | 2173 | | [2955-2973] 3′UTR |
| AACACACAAGAGUUGUUGA | 1559 | UCAACAACUCUUGUGUGUU | 2174 | | [3541-3559] 3′UTR |
| GGGAACUAGGGAACCUAUG | 1560 | CAUAGGUUCCCUAGUUCCC | 2175 | Rh | [2264-2282] 3′UTR |
| AUACAGGCACAUUAUGUAA | 1561 | UUACAUAAUGUGCCUGUAU | 2176 | | [2407-2425] 3′UTR |
| GACGUGGGUCCAAGGUCCU | 1562 | AGGACCUUGGACCCACGUC | 2177 | | [1143-1161] 3′UTR |
| GGGUUAGGAUAGGAAGAAC | 1563 | GUUCUUCCUAUCCUAACCC | 2178 | | [2321-2339] 3′UTR |
| GGACGAGUGCCUCUGGAUG | 1564 | CAUCCAGAGGCACUCGUCC | 2179 | Rh, Rb, Cw | [808-826] ORF |
| AAAAAGCCUCCAAGGGUUU | 1565 | AAACCCUUGGAGGCUUUUU | 2180 | | [998-1016] 3′UTR |
| CUUUGAGUAGGUUCGGUCU | 1566 | AGACCGAACCUACUCAAAG | 2181 | | [3097-3115] 3′UTR |
| GGCAGACUGGGAGGGUAUC | 1567 | GAUACCCUCCCAGUCUGCC | 2182 | Rh | [2620-2638] 3′UTR |
| GAAGGCUCUCCAUUUGGCA | 1568 | UGCCAAAUGGAGAGCCUUC | 2183 | | [3271-3289] 3′UTR |
| GCCUCCCUCUGAGCCUUGU | 1569 | ACAAGGCUCAGAGGGAGGC | 2184 | Rh | [1600-1618] 3′UTR |
| ACAAAACAGGUUAAGAAGA | 1570 | UCUUCUUAACCUGUUUUGU | 2185 | | [3178-3196] 3′UTR |
| CCUAUGUGUUCCCUCAGUG | 1571 | CACUGAGGGAACACAUAGG | 2186 | | [2277-2295] 3′UTR |
| AAAGGGCCUGAGAAGGAUA | 1572 | UAUCCUUCUCAGGCCCUUU | 2187 | | [539-557] ORF |
| GCAGACUGCGCAUGUCUCU | 1573 | AGAGACAUGCGCAGUCUGC | 2188 | | [3570-3588] 3′UTR |
| CCCUCCCAGGCUUAGUGUU | 1574 | AACACUAAGCCUGGGAGGG | 2189 | | [1956-1974] 3′UTR |
| CCUCCAAGGGUUUCGACUG | 1575 | CAGUCGAAACCCUUGGAGG | 2190 | Rh | [1004-1022] 3′UTR |
| GCUAGUUCUUGAAGGAGCC | 1576 | GGCUCCUUCAAGAACUAGC | 2191 | | [1545-1563] 3′UTR |
| CUUGAUGACUUCCCUUUCU | 1577 | AGAAAGGGAAGUCAUCAAG | 2192 | Rh | [2599-2617] 3′UTR |
| AUUAAUCCUCAGAAUUCCA | 1578 | UGGAAUUCUGAGGAUUAAU | 2193 | Rh | [1575-1593] 3′UTR |
| GACCAGUCCAUGUGAUUUC | 1579 | GAAAUCACAUGGACUGGUC | 2194 | Rh | [2711-2729] 3′UTR |
| AGUGAGAAGGAAGUGGACU | 1580 | AGUCCACUUCCUUCUCACU | 2195 | | [452-470] ORF |
| GAGAAUCUCUUGUUUCCUC | 1581 | GAGGAAACAAGAGAUUCUC | 2196 | | [2358-2376] 3′UTR |
| GGCUCUCCAUUUGGCAUCG | 1582 | CGAUGCCAAAUGGAGAGCC | 2197 | | [3274-3292] 3′UTR |
| CUUCUUGCCUGUUCUGGCA | 1583 | UGCCAGAACAGGCAAGAAG | 2198 | | [1824-1842] 3′UTR |
| CUUUAUAUUUGAUCCACAC | 1584 | GUGUGGAUCAAAUAUAAAG | 2199 | | [3128-3146] 3′UTR |
| GGGCCUGGAAAUGUGCAUU | 1585 | AAUGCACAUUUCCAGGCCC | 2200 | Rh | [1320-1338] 3′UTR |
| CUUUGGUGACACACUCACU | 1586 | AGUGAGUGUGUCACCAAAG | 2201 | | [2088-2106] 3′UTR |
| CAGCCUAGGAAGGGAAGGA | 1587 | UCCUUCCCUUCCUAGGCUG | 2202 | Rh | [2053-2071] 3′UTR |
| CUCGCUGGACGUUGGAGGA | 1588 | UCCUCCAACGUCCAGCGAG | 2203 | Rt, Ms | [601-619] ORF |
| GCUUUAUCCGGGCUUGUGU | 1589 | ACACAAGCCCGGAUAAAGC | 2204 | | [1873-1891] 3′UTR |
| UGGACUCUGGAAACGACAU | 1590 | AUGUCGUUUCCAGAGUCCA | 2205 | Rh | [465-483] ORF |
| GCAUCGUGGAAGCAUUUGA | 1591 | UCAAAUGCUUCCACGAUGC | 2206 | Rh | [2949-2967] 3′UTR |
| CCUAAAGUUGGUAAGAUGU | 1592 | ACAUCUUACCAACUUUAGG | 2207 | Rh | [2685-2703] 3′UTR |
| GUGGUCUUGCAAAAUGCUU | 1593 | AAGCAUUUUGCAAGACCAC | 2208 | | [2466-2484] 3′UTR |
| CAAGGUCCCUUCCCUAGCU | 1594 | AGCUAGGGAAGGGACCUUG | 2209 | | [1789-1807] 3′UTR |
| GCUUUGUAUCAUUCUUGAG | 1595 | CUCAAGAAUGAUACAAAGC | 2210 | | [3592-3610] 3′UTR |
| GGGCUUCGAUCCUUGGGUG | 1596 | CACCCAAGGAUCGAAGCCC | 2211 | Rh | [1198-1216] 3′UTR |
| UCAUAAUGGACCAGUCCAU | 1597 | AUGGACUGGUCCAUUAUGA | 2212 | Rh | [2703-2721] 3′UTR |
| UAUAGUUUAAGAAGGCUCU | 1598 | AGAGCCUUCUUAAACUAUA | 2213 | | [3261-3279] 3′UTR |
| UCGACAUCGAGGACCCAUA | 1599 | UAUGGGUCCUCGAUGUCGA | 2214 | Dg | [945-963] ORF |
| ACUUCUUUCUCAGCCUCCA | 1600 | UGGAGGCUGAGAAAGAAGU | 2215 | | [2104-2122] 3′UTR |
| AUUCUCAGAUGAUAGGUGA | 1601 | UCACCUAUCAUCUGAGAAU | 2216 | | [2170-2188] 3′UTR |
| UGAGAAGGAAGUGGACUCU | 1602 | AGAGUCCACUUCCUUCUCA | 2217 | | [454-472] ORF |
| CAAAGCACCUGUUAAGACU | 1603 | AGUCUUAACAGGUGCUUUG | 2218 | Rh | [2523-2541] 3′UTR |
| GCGUUCCAGCCUCAGCUGA | 1604 | UCAGCUGAGGCUGGAACGC | 2219 | | [1650-1668] 3′UTR |
| CCUGGGCGUGGUCUUGCAA | 1605 | UUGCAAGACCACGCCCAGG | 2220 | | [2459-2477] 3′UTR |
| GUCUCUGAUGCUUUGUAUC | 1606 | GAUACAAAGCAUCAGAGAC | 2221 | | [3583-3601] 3′UTR |
| CUGUGCCCUCCCAGGCUUA | 1607 | UAAGCCUGGGAGGGCACAG | 2222 | | [1951-1969] 3′UTR |
| CCUCCAACCCAUAUAACAC | 1608 | GUGUUAUAUGGGUUGGAGG | 2223 | | [2753-2771] 3′UTR |
| UUUGUAUCAUUCUUGAGCA | 1609 | UGCUCAAGAAUGAUACAAA | 2224 | | [3594-3612] 3′UTR |
| GCCUUUAUAUUUGAUCCAC | 1610 | GUGGAUCAAAUAUAAAGGC | 2225 | | [3126-3144] 3′UTR |
| AGGCCUACCAGGUCCCUUU | 1611 | AAAGGGACCUGGUAGGCCU | 2226 | Rh | [1378-1396] 3′UTR |
| GUUCUAAGCACAGCUCUCU | 1612 | AGAGAGCUGUGCUUAGAAC | 2227 | | [3310-3328] 3′UTR |
| CUGUGUUUUUUAUUACCCU | 1613 | AGGGUAAUAAAAAACACAG | 2228 | Rh | [2889-2907] 3′UTR |
| CUAGGAAGGGAAGGAUUUU | 1614 | AAAAUCCUUCCCUUCCUAG | 2229 | Rh | [2057-2075] 3′UTR |
| CAGAUGGGCUGCGAGUGCA | 1615 | UGCACUCGCAGCCCAUCUG | 2230 | Ck, Rb, Rt | [746-764] ORF |
| CUGGCAUCAGGCACCUGGA | 1616 | UCCAGGUGCCUGAUGCCAG | 2231 | | [1837-1855] 3′UTR |
| UGAUGCUUUGUAUCAUUCU | 1617 | AGAAUGAUACAAAGCAUCA | 2232 | | [3588-3606] 3′UTR |
| AGUCCAGCCUAGGAAGGGA | 1618 | UCCCUUCCUAGGCUGGACU | 2233 | Rh | [2049-2067] 3′UTR |
| CAAAGAUUACCUAGCUAAG | 1619 | CUUAGCUAGGUAAUCUUUG | 2234 | | [2235-2253] 3′UTR |
| AGAAGGAAGUGGACUCUGG | 1620 | CCAGAGUCCACUUCCUUCU | 2235 | | [456-474] ORF |
| UGUACAGUGACCUAAAGUU | 1621 | AACUUUAGGUCACUGUACA | 2236 | | [2675-2693] 3′UTR |

TABLE B2
19-mer siTIMP2 Cross-Species

| | | | | | | |
|---|---|---|---|---|---|---|
| | | SEQ | | SEQ | | |
| | | ID | | ID | | human-73858577 |
| No. | Sense (5′ > 3′) | NO: | Antisense (5′ > 3′) | NO: | Other Sp | ORF: 303-965 |

| | | | | | | |
|---|---|---|---|---|---|---|
| 1 | UUCGCCUGCAUCAAGAGAA | 2237 | UUCUCUUGAUGCAGGCGAA | 2354 | Rh, Cw, Dg, Ms | [872-890] ORF |
| 2 | GUGCAUUUUGCAGAAACUU | 2238 | AAGUUUCUGCAAAAUGCAC | 2355 | Rh, Rt, Ms | [1332-1350] 3′UTR |
| 3 | GGUACCAGAUGGGCUGCGA | 2239 | UCGCAGCCCAUCUGGUACC | 2356 | Rh, Ck, Rb, Rt | [741-759] ORF |
| 4 | GGUCUCGCUGGACGUUGGA | 2240 | UCCAACGUCCAGCGAGACC | 2357 | Rt, Ms | [598-616] ORF |
| 5 | UCGCCUGCAUCAAGAGAAG | 2241 | CUUCUCUUGAUGCAGGCGA | 2358 | Rh, Cw, Dg, Ms | [873-891] ORF |
| 6 | CUUCCUGGAAACAGCAUGA | 2242 | UCAUGCUGUUUCCAGGAAG | 2359 | Rh, Rb, Rt, Ms | [1040-1058] 3′UTR |
| 7 | GGGCACCAGGCCAAGUUCU | 2243 | AGAACUUGGCCUGGUGCCC | 2360 | Rh, Rb, Rt, Ms | [854-872] ORF |
| 8 | CCAGAAGAAGAGCCUGAAC | 2244 | GUUCAGGCUCUUCUUCUGG | 2361 | Rh, Rb, Cw, Ms, Pg | [718-736] ORF |
| 9 | UGGACGUUGGAGGAAAGAA | 2245 | UUCUUUCCUCCAACGUCCA | 2362 | Rt, Ms | [606-624] ORF |
| 10 | GGGCUGCGAGUGCAAGAUC | 2246 | GAUCUUGCACUCGCAGCCC | 2363 | Ck, Rb, Rt | [751-769] ORF |
| 11 | CCACCCAGAAGAAGAGCCU | 2247 | AGGCUCUUCUUCUGGGUGG | 2364 | Rh, Ck, Cw, Rt, Ms, Pg | [714-732] ORF |
| 12 | AUGGGCUGCGAGUGCAAGA | 2248 | UCUUGCACUCGCAGCCCAU | 2365 | Ck, Rb, Rt | [749-767] ORF |
| 13 | AUGGACUGGGUCACAGAGA | 2249 | UCUCUGUGACCCAGUCCAU | 2366 | Rh, Rt, Ms, Pg | [824-842] ORF |
| 14 | UGGGCUGCGAGUGCAAGAU | 2250 | AUCUUGCACUCGCAGCCCA | 2367 | Ck, Rb, Rt | [750-768] ORF |
| 15 | ACGUUGGAGGAAAGAAGGA | 2251 | UCCUUCUUUCCUCCAACGU | 2368 | Rt, Ms | [609-627] ORF |
| 16 | GACGUUGGAGGAAAGAAGG | 2252 | CCUUCUUUCCUCCAACGUC | 2369 | Rt, Ms | [608-626] ORF |
| 17 | AGGCCAAGUUCUUCGCCUG | 2253 | CAGGCGAAGAACUUGGCCU | 2370 | Rh, Rb, Cw, Dg, Ms | [861-879] ORF |
| 18 | GAAGAAGAGCCUGAACCAC | 2254 | GUGGUUCAGGCUCUUCUUC | 2371 | Rh, Rb, Cw, Ms, Pg | [721-739] ORF |
| 19 | GCACCCGCAACAGGCGUUU | 2255 | AAACGCCUGUUGCGGGUGC | 2372 | Cw, Dg, Rt, Ms | [397-415] ORF |
| 20 | UUCUUCGCCUGCAUCAAGA | 2256 | UCUUGAUGCAGGCGAAGAA | 2373 | Rh, Rb, Cw, Dg, Ms | [869-887] ORF |
| 21 | GAGCCUGAACCACAGGUAC | 2257 | GUACCUGUGGUUCAGGCUC | 2374 | Rh, Rb, Cw, Ms, Pg | [727-745] ORF |
| 22 | CUUCGCCUGCAUCAAGAGA | 2258 | UCUCUUGAUGCAGGCGAAG | 2375 | Rh, Rb, Cw, Dg, Ms | [871-889] ORF |
| 23 | UGGAAACAGCAUGAAUAAA | 2259 | UUUAUUCAUGCUGUUUCCA | 2376 | Rh, Rb, Rt, Ms | [1045-1063] 3′UTR |
| 24 | GACAUCCCUUCCUGGAAAC | 2260 | GUUUCCAGGAAGGGAUGUC | 2377 | Rh, Rt, Ms | [1033-1051] 3′UTR |
| 25 | GUUCUUCGCCUGCAUCAAG | 2261 | CUUGAUGCAGGCGAAGAAC | 2378 | Rh, Rb, Cw, Dg, Ms | [868-886] ORF |
| 26 | AAGUUCUUCGCCUGCAUCA | 2262 | UGAUGCAGGCGAAGAACUU | 2379 | Rh, Rb, Cw, Dg, Ms | [866-884] ORF |
| 27 | CCCUUCCUGGAAACAGCAU | 2263 | AUGCUGUUUCCAGGAAGGG | 2380 | Rh, Rb, Rt, Ms | [1038-1056] 3′UTR |
| 28 | CGCUCGGCCUCCUGCUGCU | 2264 | AGCAGCAGGAGGCCGAGCG | 2381 | Dg, Rt, Ms | [333-351] ORF |
| 29 | UGAACCACAGGUACCAGAU | 2265 | AUCUGGUACCUGUGGUUCA | 2382 | Rh, Rb, Cw, Ms, Pg | [732-750] ORF |
| 30 | CUGAACCACAGGUACCAGA | 2266 | UCUGGUACCUGUGGUUCAG | 2383 | Rh, Rb, Cw, Ms, Pg | [731-749] ORF |
| 31 | CAGAAGAAGAGCCUGAACC | 2267 | GGUUCAGGCUCUUCUUCUG | 2384 | Rh, Rb, Cw, Ms, Pg | [719-737] ORF |
| 32 | UCCUGGAAACAGCAUGAAU | 2268 | AUUCAUGCUGUUUCCAGGA | 2385 | Rh, Rb, Rt, Ms | [1042-1060] 3′UTR |
| 33 | GAUGGACUGGGUCACAGAG | 2269 | CUCUGUGACCCAGUCCAUC | 2386 | Rh, Rt, Ms, Pg | [823-841] ORF |
| 34 | GCCGACGCCUGCAGCUGCU | 2270 | AGCAGCUGCAGGCGUCGGC | 2387 | Cw, Dg, Rt, Ms | [371-389] ORF |
| 35 | CAGGCGUUUUGCAAUGCAG | 2271 | CUGCAUUGCAAAACGCCUG | 2388 | Cw, Rt, Ms | [407-425] ORF |
| 36 | UCAAGCAGAUAAAGAUGUU | 2272 | AACAUCUUUAUCUGCUUGA | 2389 | Cw, Dg, Rt, Ms, Pg | [519-537] ORF |
| 37 | GAACCACAGGUACCAGAUG | 2273 | CAUCUGGUACCUGUGGUUC | 2390 | Rh, Rb, Cw, Rt, Ms, Pg | [733-751] ORF |
| 38 | CACCCAGAAGAAGAGCCUG | 2274 | CAGGCUCUUCUUCUGGGUG | 2391 | Rh, Ck, Cw, Rt, Ms, Pg | [715-733] ORF |
| 39 | CCUUCCUGGAAACAGCAUG | 2275 | CAUGCUGUUUCCAGGAAGG | 2392 | Rh, Rb, Rt, Ms | [1039-1057] 3′UTR |
| 40 | CAACAGGCGUUUUGCAAUG | 2276 | CAUUGCAAAACGCCUGUUG | 2393 | Cw, Rt, Ms | [404-422] ORF |
| 41 | CACAGGUACCAGAUGGGCU | 2277 | AGCCCAUCUGGUACCUGUG | 2394 | Rh, Rb, Cw, Rt, Ms, Pg | [737-755] ORF |
| 42 | UCCCUUCCUGGAAACAGCA | 2278 | UGCUGUUUCCAGGAAGGGA | 2395 | Rh, Rb, Rt, Ms | [1037-1055] 3′UTR |
| 43 | UGAGAUCAAGCAGAUAAAG | 2279 | CUUUAUCUGCUUGAUCUCA | 2396 | Rh, Cw, Dg, Rt, Ms | [514-532] ORF |
| 44 | GGUGCACCCGCAACAGGCG | 2280 | CGCCUGUUGCGGGUGCACC | 2397 | Cw, Dg, Rt, Ms | [394-412] ORF |
| 45 | AGUGCCUCUGGAUGGACUG | 2281 | CAGUCCAUCCAGAGGCACU | 2398 | Rh, Rb, Cw, Dg, Rt, Ms | [813-831] ORF |
| 46 | AAGCAGAUAAAGAUGUUCA | 2282 | UGAACAUCUUUAUCUGCUU | 2399 | Cw, Dg, Rt, Ms, Pg | [521-539] ORF |
| 47 | UGCACCCGCAACAGGCGUU | 2283 | AACGCCUGUUGCGGGUGCA | 2400 | Cw, Dg, Rt, Ms | [396-414] ORF |
| 48 | CACCCGCAACAGGCGUUUU | 2284 | AAAACGCCUGUUGCGGGUG | 2401 | Cw, Rt, Ms | [398-416] ORF |
| 49 | CUGGACGUUGGAGGAAAGA | 2285 | UCUUUCCUCCAACGUCCAG | 2402 | Rt, Ms | [605-623] ORF |
| 50 | AUCCCUUCCUGGAAACAGC | 2286 | GCUGUUUCCAGGAAGGGAU | 2403 | Rh, Rb, Rt, Ms | [1036-1054] 3′UTR |
| 51 | ACAGGCGUUUUGCAAUGCA | 2287 | UGCAUUGCAAAACGCCUGU | 2404 | Cw, Rt, Ms | [406-424] ORF |
| 52 | GAUGGGCUGCGAGUGCAAG | 2288 | CUUGCACUCGCAGCCCAUC | 2405 | Ck, Rb, Rt | [748-766] ORF |
| 53 | AGCCUGAACCACAGGUACC | 2289 | GGUACCUGUGGUUCAGGCU | 2406 | Rh, Rb, Cw, Ms, Pg | [728-746] ORF |
| 54 | CCUCUGGAUGGACUGGGUC | 2290 | GACCCAGUCCAUCCAGAGG | 2407 | Rh, Rb, Cw, Dg, Rt, Ms, | [817-835] ORF |
| | | | | | Pg | |
| 55 | CGGGCACCAGGCCAAGUUC | 2291 | GAACUUGGCCUGGUGCCCG | 2408 | Rh, Rb, Rt, Ms | [853-871] ORF |
| 56 | CAGGCCAAGUUCUUCGCCU | 2292 | AGGCGAAGAACUUGGCCUG | 2409 | Rh, Rb, Cw, Dg, Ms | [860-878] ORF |
| 57 | CAAGUUCUUCGCCUGCAUC | 2293 | GAUGCAGGCGAAGAACUUG | 2410 | Rh, Rb, Cw, Dg, Ms | [865-883] ORF |
| 58 | ACUUCAUCGUGCCCUGGGA | 2294 | UCCCAGGGCACGAUGAAGU | 2411 | Rh, Rb, Cw, Dg, Pg | [684-702] ORF |
| 59 | ACAUCCCUUCCUGGAAACA | 2295 | UGUUUCCAGGAAGGGAUGU | 2412 | Rh, Rt, Ms | [1034-1052] 3′UTR |
| 60 | UACCAGAUGGGCUGCGAGU | 2296 | ACUCGCAGCCCAUCUGGUA | 2413 | Rh, Ck, Rb, Rt | [743-761] ORF |
| 61 | GGCCAAGUUCUUCGCCUGC | 2297 | GCAGGCGAAGAACUUGGCC | 2414 | Rh, Rb, Cw, Dg, Ms | [862-880] ORF |
| 62 | CCAGAUGGGCUGCGAGUGC | 2298 | GCACUCGCAGCCCAUCUGG | 2415 | Rh, Ck, Rb, Rt | [745-763] ORF |
| 63 | GUGACUUCAUCGUGCCCUG | 2299 | CAGGGCACGAUGAAGUCAC | 2416 | Rh, Rb, Cw, Dg, Pg | [681-699] ORF |
| 64 | UCGCUGGACGUUGGAGGAA | 2300 | UUCCUCCAACGUCCAGCGA | 2417 | Rt, Ms | [602-620] ORF |
| 65 | AUCAAGCAGAUAAAGAUGU | 2301 | ACAUCUUUAUCUGCUUGAU | 2418 | Cw, Dg, Rt, Ms, Pg | [518-536] ORF |
| 66 | GUACCAGAUGGGCUGCGAG | 2302 | CUCGCAGCCCAUCUGGUAC | 2419 | Rh, Ck, Rb, Rt | [742-760] ORF |
| 67 | CGAGUGCCUCUGGAUGGAC | 2303 | GUCCAUCCAGAGGCACUCG | 2420 | Rh, Rb, Cw, Dg, Rt, Ms | [811-829] ORF |
| 68 | UCUGGAUGGACUGGGUCAC | 2304 | GUGACCCAGUCCAUCCAGA | 2421 | Rh, Rb, Cw, Dg, Rt, Ms, | [819-837] ORF |
| | | | | | Pg | |
| 69 | ACCAGAUGGGCUGCGAGUG | 2305 | CACUCGCAGCCCAUCUGGU | 2422 | Rh, Ck, Rb, Rt | [744-762] ORF |
| 70 | ACAGGUACCAGAUGGGCUG | 2306 | CAGCCCAUCUGGUACCUGU | 2423 | Rh, Rb, Cw, Rt, Ms, Pg | [738-756] ORF |
| 71 | GAAGAGCCUGAACCACAGG | 2307 | CCUGUGGUUCAGGCUCUUC | 2424 | Rh, Rb, Cw, Ms, Pg | [724-742] ORF |
| 72 | GUGCACCCGCAACAGGCGU | 2308 | ACGCCUGUUGCGGGUGCAC | 2425 | Cw, Dg, Rt, Ms | [395-413] ORF |
| 73 | UGGAUGGACUGGGUCACAG | 2309 | CUGUGACCCAGUCCAUCCA | 2426 | Rh, Rt, Ms, Pg | [821-839] ORF |
| 74 | CAAGCAGAUAAAGAUGUUC | 2310 | GAACAUCUUUAUCUGCUUG | 2427 | Cw, Dg, Rt, Ms, Pg | [520-538] ORF |
| 75 | GUGCCUCUGGAUGGACUGG | 2311 | CCAGUCCAUCCAGAGGCAC | 2428 | Rh, Rb, Cw, Dg, Rt, Ms | [814-832] ORF |
| 76 | CAUCCCUUCCUGGAAACAG | 2312 | CUGUUUCCAGGAAGGGAUG | 2429 | Rh, Rb, Rt, Ms | [1035-1053] 3′UTR |
| 77 | CACCAGGCCAAGUUCUUCG | 2313 | CGAAGAACUUGGCCUGGUG | 2430 | Rh, Rb, Cw, Ms | [857-875] ORF |
| 78 | CCUGAACCACAGGUACCAG | 2314 | CUGGUACCUGUGGUUCAGG | 2431 | Rh, Rb, Cw, Ms, Pg | [730-748] ORF |
| 79 | AACCACAGGUACCAGAUGG | 2315 | CCAUCUGGUACCUGUGGUU | 2432 | Rh, Rb, Cw, Rt, Ms, Pg | [734-752] ORF |
| 80 | GUCUCGCUGGACGUUGGAG | 2316 | CUCCAACGUCCAGCGAGAC | 2433 | Rt, Ms | [599-617] ORF |
| 81 | AGAGUUUAUCUACACGGCC | 2317 | GGCCGUGUAGAUAAACUCU | 2434 | Dg, Ms, Pg | [559-577] ORF |
| 82 | UUCCUGGAAACAGCAUGAA | 2318 | UUCAUGCUGUUUCCAGGAA | 2435 | Rh, Rb, Rt, Ms | [1041-1059] 3′UTR |
| 83 | GAUAAAGAUGUUCAAAGGG | 2319 | CCCUUUGAACAUCUUUAUC | 2436 | Dg, Rt, Ms | [526-544] ORF |
| 84 | UCUUCGCCUGCAUCAAGAG | 2320 | CUCUUGAUGCAGGCGAAGA | 2437 | Rh, Rb, Cw, Dg, Ms | [870-888] ORF |
| 85 | UGGCGCUCGGCCUCCUGCU | 2321 | AGCAGGAGGCCGAGCGCCA | 2438 | Dg, Rt, Ms | [330-348] ORF |
| 86 | CCCGGUGCACCCGCAACAG | 2322 | CUGUUGCGGGUGCACCGGG | 2439 | Cw, Dg, Rt, Ms | [391-409] ORF |
| 87 | CCCGCAACAGGCGUUUUGC | 2323 | GCAAAACGCCUGUUGCGGG | 2440 | Cw, Rt, Ms | [400-418] ORF |
| 88 | CAGGGCCAAAGCGGUCAGU | 2324 | ACUGACCGCUUUGGCCCUG | 2441 | Rb, Dg | [436-454] ORF |
| 89 | AAGAGCCUGAACCACAGGU | 2325 | ACCUGUGGUUCAGGCUCUU | 2442 | Rh, Rb, Cw, Ms, Pg | [725-743] ORF |
| 90 | ACCACAGGUACCAGAUGGG | 2326 | CCCAUCUGGUACCUGUGGU | 2443 | Rh, Rb, Cw, Rt, Ms, Pg | [735-753] ORF |
| 91 | CAGGUACCAGAUGGGCUGC | 2327 | GCAGCCCAUCUGGUACCUG | 2444 | Rh, Rb, Cw, Dg, Rt, Ms, | [739-757] ORF |
| | | | | | Pg | |
| 92 | CGGUGCACCCGCAACAGGC | 2328 | GCCUGUUGCGGGUGCACCG | 2445 | Cw, Dg, Rt, Ms | [393-411] ORF |
| 93 | GCUCGGCCUCCUGCUGCUG | 2329 | CAGCAGCAGGAGGCCGAGC | 2446 | Dg, Rt, Ms | [334-352] ORF |
| 94 | GACGCCUGCAGCUGCUCCC | 2330 | GGGAGCAGCUGCAGGCGUC | 2447 | Cw, Dg, Rt, Ms | [374-392] ORF |
| 95 | ACCCGCAACAGGCGUUUUG | 2331 | CAAAACGCCUGUUGCGGGU | 2448 | Cw, Rt, Ms | [399-417] ORF |
| 96 | CCGGUGCACCCGCAACAGG | 2332 | CCUGUUGCGGGUGCACCGG | 2449 | Cw, Dg, Rt, Ms | [392-410] ORF |
| 97 | UCUCGCUGGACGUUGGAGG | 2333 | CCUCCAACGUCCAGCGAGA | 2450 | Rt, Ms | [600-618] ORF |
| 98 | AACAGCAUGAAUAAAACAC | 2334 | GUGUUUUAUUCAUGCUGUU | 2451 | Rh, Rt, Ms | [1049-1067] 3′UTR |
| 99 | CCACAGGUACCAGAUGGGC | 2335 | GCCCAUCUGGUACCUGUGG | 2452 | Rh, Rb, Cw, Rt, Ms, Pg | [736-754] ORF |
| 100 | CCGACGCCUGCAGCUGCUC | 2336 | GAGCAGCUGCAGGCGUCGG | 2453 | Cw, Dg, Rt, Ms | [372-390] ORF |
| 101 | UUCAUCGUGCCCUGGGACA | 2337 | UGUCCCAGGGCACGAUGAA | 2454 | Rh, Rb, Cw, Dg, Pg | [686-704] ORF |
| 102 | CUUCAUCGUGCCCUGGGAC | 2338 | GUCCCAGGGCACGAUGAAG | 2455 | Rh, Rb, Cw, Dg, Pg | [685-703] ORF |
| 103 | CGACGCCUGCAGCUGCUCC | 2339 | GGAGCAGCUGCAGGCGUCG | 2456 | Cw, Dg, Rt, Ms | [373-391] ORF |
| 104 | UGCCUCUGGAUGGACUGGG | 2340 | CCCAGUCCAUCCAGAGGCA | 2457 | Rh, Rb, Cw, Dg, Rt, Ms | [815-833] ORF |
| 105 | ACCAGGCCAAGUUCUUCGC | 2341 | GCGAAGAACUUGGCCUGGU | 2458 | Rh, Rb, Cw, Ms | [858-876] ORF |
| 106 | AGGUACCAGAUGGGCUGCG | 2342 | CGCAGCCCAUCUGGUACCU | 2459 | Rh, Ck, Rb, Rt | [740-758] ORF |
| 107 | CUCGGCCUCCUGCUGCUGG | 2343 | CCAGCAGCAGGAGGCCGAG | 2460 | Dg, Rt | [335-353] ORF |
| 108 | AACAGGCGUUUUGCAAUGC | 2344 | GCAUUGCAAAACGCCUGUU | 2461 | Cw, Rt, Ms | [405-423] ORF |
| 109 | UCGGCCUCCUGCUGCUGGC | 2345 | GCCAGCAGCAGGAGGCCGA | 2462 | Dg, Rt | [336-354] ORF |
| 110 | CCAGGCCAAGUUCUUCGCC | 2346 | GGCGAAGAACUUGGCCUGG | 2463 | Rh, Rb, Cw, Dg, Ms | [859-877] ORF |
| 111 | UGUGACUUCAUCGUGCCCU | 2347 | AGGGCACGAUGAAGUCACA | 2464 | Rh, Rb, Cw, Dg, Pg | [680-698] ORF |
| 112 | GACUUCAUCGUGCCCUGGG | 2348 | CCCAGGGCACGAUGAAGUC | 2465 | Rh, Rb, Cw, Dg, Pg | [683-701] ORF |
| 113 | CUGUGACUUCAUCGUGCCC | 2349 | GGGCACGAUGAAGUCACAG | 2466 | Rh, Rb, Cw, Dg, Pg | [679-697] ORF |
| 114 | UGACUUCAUCGUGCCCUGG | 2350 | CCAGGGCACGAUGAAGUCA | 2467 | Rh, Rb, Cw, Dg, Pg | [682-700] ORF |
| 616 | GCAGGAGUUUCUCGACAUC | 2351 | GAUGUCGAGAAACUCCUGC | 2468 | Dg, Ck | [934-952] ORF |
| 617 | GCACCACCCAGAAGAAGAG | 2352 | CUCUUCUUCUGGGUGGUGC | 2469 | Pg, Rh | [711-729] ORF |
| 618 | AGCUCUGACAUCCCUUCCU | 2353 | AGGAAGGGAUGUCAGAGCU | 2470 | Rh | [1027-1045] 3′UTR |

TABLE B3
Preferred 19-mer siTIMP2

| | | | | | | |
|---|---|---|---|---|---|---|
| | | SEQ | | SEQ | | |
| | | ID | | ID | | |
| siTIMP2_pNo. | Sense (5′ > 3′) | NO: | Antisense (5′ > 3′) | NO: | length | position |

| | | | | | | |
|---|---|---|---|---|---|---|
| siTIMP2_p4 | GGCUGCGAGUGCAAGAUCA | 2471 | UGAUCUUGCACUCGCAGCC | 2524 | 19 | [752-770] ORF |
| siTIMP2_p16 | GUAUGAGAUCAAGCAGAUA | 2472 | UAUCUGCUUGAUCUCAUAC | 2525 | 19 | [511-529] ORF |
| siTIMP2_p17 | GAGGAAAGAAGGAAUAUCU | 2473 | AGAUAUUCCUUCUUUCCUC | 2526 | 19 | [615-633] ORF |
| siTIMP2_p18 | CCUGCAUCAAGAGAAGUGA | 2474 | UCACUUCUCUUGAUGCAGG | 2527 | 19 | [876-894] ORF |
| siTIMP2_p20 | AUGAGAUCAAGCAGAUAAA | 2475 | UUUAUCUGCUUGAUCUCAU | 2528 | 19 | [513-531] ORF |
| siTIMP2_p24 | GUUGGAGGAAAGAAGGAAU | 2476 | AUUCCUUCUUUCCUCCAAC | 2529 | 19 | [611-629] ORF |
| siTIMP2_p25 | ACUGGGUCACAGAGAAGAA | 2477 | UUCUUCUCUGUGACCCAGU | 2530 | 19 | [828-846] ORF |
| siTIMP2_p27 | CUCUGGAUGGACUGGGUCA | 2478 | UGACCCAGUCCAUCCAGAG | 2531 | 19 | [818-836] ORF |
| siTIMP2_p29 | GGCGUUUUGCAAUGCAGAU | 2479 | AUCUGCAUUGCAAAACGCC | 2532 | 19 | [409-427] ORF |
| siTIMP2_p30 | GCCUCUGGAUGGACUGGGU | 2480 | ACCCAGUCCAUCCAGAGGC | 2533 | 19 | [816-834] ORF |
| siTIMP2_p33 | GGAGGAAAGAAGGAAUAUC | 2481 | GAUAUUCCUUCUUUCCUCC | 2534 | 19 | [614-632] ORF |
| siTIMP2_p35 | GGACUGGGUCACAGAGAAG | 2482 | CUUCUCUGUGACCCAGUCC | 2535 | 19 | [826-844] ORF |
| siTIMP2_p37 | GGACGUUGGAGGAAAGAAG | 2483 | CUUCUUUCCUCCAACGUCC | 2536 | 19 | [607-625] ORF |
| siTIMP2_p38 | CGUUGGAGGAAAGAAGGAA | 2484 | UUCCUUCUUUCCUCCAACG | 2537 | 19 | [610-628] ORF |
| siTIMP2_p39 | CUGACAUCCCUUCCUGGAA | 2485 | UUCCAGGAAGGGAUGUCAG | 2538 | 19 | [1031-1049]3′UTR |
| siTIMP2_p40 | UGACAUCCCUUCCUGGAAA | 2486 | UUUCCAGGAAGGGAUGUCA | 2539 | 19 | [1032-1050]3′UTR |
| siTIMP2_p41 | AGAUGGGCUGCGAGUGCAA | 2487 | UUGCACUCGCAGCCCAUCU | 2540 | 19 | [747-765] ORF |
| siTIMP2_p44 | GGGUCUCGCUGGACGUUGG | 2488 | CCAACGUCCAGCGAGACCC | 2541 | 19 | [597-615] ORF |
| siTIMP2_p46 | GAGUGCCUCUGGAUGGACU | 2489 | AGUCCAUCCAGAGGCACUC | 2542 | 19 | [812-830] ORF |
| siTIMP2_p51 | AGCAGAUAAAGAUGUUCAA | 2490 | UUGAACAUCUUUAUCUGCU | 2543 | 19 | [522-540] ORF |
| siTIMP2_p55 | GCAACAGGCGUUUUGCAAU | 2491 | AUUGCAAAACGCCUGUUGC | 2544 | 19 | [403-421] ORF |
| siTIMP2_p61 | GCUGGACGUUGGAGGAAAG | 2492 | CUUUCCUCCAACGUCCAGC | 2545 | 19 | [604-622] ORF |
| siTIMP2_p62 | UGUGCAUUUUGCAGAAACU | 2493 | AGUUUCUGCAAAAUGCACA | 2546 | 19 | [1331-1349]3′UTR |
| siTIMP2_p64 | GGCACCAGGCCAAGUUCUU | 2494 | AAGAACUUGGCCUGGUGCC | 2547 | 19 | [855-873] ORF |
| siTIMP2_p65 | GCCUGCAUCAAGAGAAGUG | 2495 | CACUUCUCUUGAUGCAGGC | 2548 | 19 | [875-893] ORF |
| siTIMP2_p67 | CUGGAUGGACUGGGUCACA | 2496 | UGUGACCCAGUCCAUCCAG | 2549 | 19 | [820-838] ORF |
| siTIMP2_p68 | CUGCAUCAAGAGAAGUGAC | 2497 | GUCACUUCUCUUGAUGCAG | 2550 | 19 | [877-895] ORF |
| siTIMP2_p69 | CUCGCUGGACGUUGGAGGA | 2498 | UCCUCCAACGUCCAGCGAG | 2551 | 19 | [601-619] ORF |
| siTIMP2_p71 | CAGAUGGGCUGCGAGUGCA | 2499 | UGCACUCGCAGCCCAUCUG | 2552 | 19 | [746-764] ORF |
| siTIMP2_p75 | GUGCAUUUUGCAGAAACUU | 2500 | AAGUUUCUGCAAAAUGCAC | 2553 | 19 | [1332-1350]3′UTR |
| siTIMP2_p76 | GGUACCAGAUGGGCUGCGA | 2501 | UCGCAGCCCAUCUGGUACC | 2554 | 19 | [741-759] ORF |
| siTIMP2_p78 | GGUCUCGCUGGACGUUGGA | 2502 | UCCAACGUCCAGCGAGACC | 2555 | 19 | [598-616] ORF |
| siTIMP2_p79 | CUUCCUGGAAACAGCAUGA | 2503 | UCAUGCUGUUUCCAGGAAG | 2556 | 19 | [1040-1058]3′UTR |
| siTIMP2_p82 | GGGCACCAGGCCAAGUUCU | 2504 | AGAACUUGGCCUGGUGCCC | 2557 | 19 | [854-872] ORF |
| siTIMP2_p83 | GUCACAGAGAAGAACAUCA | 2505 | UGAUGUUCUUCUCUGUGAC | 2558 | 19 | [833-851] ORF |
| siTIMP2_p84 | AGGAGUUUCUCGACAUCGA | 2506 | UCGAUGUCGAGAAACUCCU | 2559 | 19 | [936-954] ORF |
| siTIMP2_p85 | CCCAGAAGAAGAGCCUGAA | 2507 | UUCAGGCUCUUCUUCUGGG | 2560 | 19 | [717-735] ORF |
| siTIMP2_p86 | GGGUCACAGAGAAGAACAU | 2508 | AUGUUCUUCUCUGUGACCC | 2561 | 19 | [831-849] ORF |
| siTIMP2_p87 | CCAAGUUCUUCGCCUGCAU | 2509 | AUGCAGGCGAAGAACUUGG | 2562 | 19 | [864-882] ORF |
| siTIMP2_p88 | AGCACCACCCAGAAGAAGA | 2510 | UCUUCUUCUGGGUGGUGCU | 2563 | 19 | [710-728] ORF |
| siTIMP2_p89 | GUUUUGCAAUGCAGAUGUA | 2511 | UACAUCUGCAUUGCAAAAC | 2564 | 19 | [412-430] ORF |
| siTIMP2_p90 | AGCAGGAGUUUCUCGACAU | 2512 | AUGUCGAGAAACUCCUGCU | 2565 | 19 | [933-951] ORF |
| siTIMP2_p91 | GGAGUUUCUCGACAUCGAG | 2513 | CUCGAUGUCGAGAAACUCC | 2566 | 19 | [937-955] ORF |
| siTIMP2_p92 | GCCUGAACCACAGGUACCA | 2514 | UGGUACCUGUGGUUCAGGC | 2567 | 19 | [729-747] ORF |
| siTIMP2_p93 | UUCGCCUGCAUCAAGAGAA | 2515 | UUCUCUUGAUGCAGGCGAA | 2568 | 19 | [872-890] ORF |
| siTIMP2_p94 | AGAGCCUGAACCACAGGUA | 2516 | UACCUGUGGUUCAGGCUCU | 2569 | 19 | [726-744] ORF |
| siTIMP2_p95 | GCAGGAGUUUCUCGACAUC | 2517 | GAUGUCGAGAAACUCCUGC | 2570 | 19 | [934-952] ORF |
| siTIMP2_p96 | GCACCACCCAGAAGAAGAG | 2518 | CUCUUCUUCUGGGUGGUGC | 2571 | 19 | [711-729] ORF |
| siTIMP2_p97 | GGACGAGUGCCUCUGGAUG | 2519 | CAUCCAGAGGCACUCGUCC | 2572 | 19 | [808-826] ORF |
| siTIMP2_p98 | GACUGGUCCAGCUCUGACA | 2520 | UGUCAGAGCUGGACCAGUC | 2573 | 19 | [1018-1036] 3′UTR |
| siTIMP2_p99 | ACAUCACCCUCUGUGACUU | 2521 | AAGUCACAGAGGGUGAUGU | 2574 | 19 | [669-687] ORF |
| siTIMP2_p100 | CCGGACGAGUGCCUCUGGA | 2522 | UCCAGAGGCACUCGUCCGG | 2575 | 19 | [806-824] ORF |
| siTIMP2_p101 | UCGCCUGCAUCAAGAGAAG | 2523 | CUUCUCUUGAUGCAGGCGA | 2576 | 19 | [873-891] ORF |
| SiTIMP2_p102 | GGAAGAACUUUCUCGGUAA | 1007 | UUACCGAGAAAGUUCUUCC | 1622 | 19 | [2332-2350]3′UTR |

TABLE B4
19 mer siTIMP2 with lowest predicted OT effect

| | | | | | | |
|---|---|---|---|---|---|---|
| | | | SEQ | | SEQ | |
| | | | ID | | ID | No. in Table |
| Cross species: | Ranking | Sense (5′ > 3′) | NO: | Antisense (5′ > 3′) | NO: | B3 |

| | | | | | | |
|---|---|---|---|---|---|---|
| H/Rt | 4 | CUCUGGAUGGACUGGGUCA | 2478 | UGACCCAGUCCAUCCAGAG | 2531 | siTIMP2_p27 |
| H/Rt | 3 | GGCGUUUUGCAAUGCAGAU | 2479 | AUCUGCAUUGCAAAACGCC | 2532 | siTIMP2_p29 |
| H/Rt | 4 | GCCUCUGGAUGGACUGGGU | 2480 | ACCCAGUCCAUCCAGAGGC | 2533 | siTIMP2_p30 |
| H/Rt | 4 | CUGACAUCCCUUCCUGGAA | 2485 | UUCCAGGAAGGGAUGUCAG | 2538 | siTIMP2_p39 |
| H/Rt | 3 | UGACAUCCCUUCCUGGAAA | 2486 | UUUCCAGGAAGGGAUGUCA | 2539 | siTIMP2_p40 |
| H/Rt | 4 | AGAUGGGCUGCGAGUGCAA | 2487 | UUGCACUCGCAGCCCAUCU | 2540 | siTIMP2_p41 |
| H/Rt | 4 | GAGUGCCUCUGGAUGGACU | 2489 | AGUCCAUCCAGAGGCACUC | 2542 | siTIMP2_p46 |
| H/Rt | 2 | GCAACAGGCGUUUUGCAAU | 2491 | AUUGCAAAACGCCUGUUGC | 2544 | siTIMP2_p55 |
| H/Rt | 4 | UGUGCAUUUUGCAGAAACU | 2493 | AGUUUCUGCAAAAUGCACA | 2546 | siTIMP2_p62 |
| H/Rt | 3 | CUGCAUCAAGAGAAGUGAC | 2497 | GUCACUUCUCUUGAUGCAG | 2550 | siTIMP2_p68 |
| H/Rt | 1 | CUCGCUGGACGUUGGAGGA | 2498 | UCCUCCAACGUCCAGCGAG | 2551 | siTIMP2_p69 |
| H/Rt | 4 | CAGAUGGGCUGCGAGUGCA | 2499 | UGCACUCGCAGCCCAUCUG | 2552 | siTIMP2_p71 |
| H/Rt | 2 | GGUACCAGAUGGGCUGCGA | 2501 | UCGCAGCCCAUCUGGUACC | 2554 | siTIMP2_p76 |
| H/Rt | 2 | GGUCUCGCUGGACGUUGGA | 2502 | UCCAACGUCCAGCGAGACC | 2555 | siTIMP2_p78 |
| H/Rt (Rt Cross 1MM) | 4 | GUUUUGCAAUGCAGAUGUA | 2511 | UACAUCUGCAUUGCAAAAC | 2564 | siTIMP2_p89 |
| H/Rt (Rt Cross 1MM) | 3 | GGAGUUUCUCGACAUCGAG | 2513 | CUCGAUGUCGAGAAACUCC | 2566 | siTIMP2_p91 |
| H/Rt (Rt Cross 1MM) | 2 | UUCGCCUGCAUCAAGAGAA | 2515 | UUCUCUUGAUGCAGGCGAA | 2568 | siTIMP2_p93 |
| H/Rt (Rt Cross 1MM) | 4 | GCAGGAGUUUCUCGACAUC | 2517 | GAUGUCGAGAAACUCCUGC | 2570 | siTIMP2_p95 |
| H/Rt (Rt Cross 1MM) | 3 | GGACGAGUGCCUCUGGAUG | 2519 | CAUCCAGAGGCACUCGUCC | 2572 | siTIMP2_p97 |
| H/Rt (Rt Cross 1MM) | 4 | GACUGGUCCAGCUCUGACA | 2520 | UGUCAGAGCUGGACCAGUC | 2573 | siTIMP2_p98 |
| H/Rt (Rt Cross 1MM) | 2 | CCGGACGAGUGCCUCUGGA | 2522 | UCCAGAGGCACUCGUCCGG | 2575 | siTIMP2_p100 |

TABLE B5
18-mer siTIMP2

| | | | | | | |
|---|---|---|---|---|---|---|
| | | SEQ | | SEQ | | |
| | | ID | | ID | | human-73858577 |
| No. | Sense (5′ > 3′) | NO: | Antisense (5′ > 3′) | NO: | Other Sp | ORF: 303-965 |

| | | | | | | |
|---|---|---|---|---|---|---|
| 1 | CCAUGUGAUUUCAGUAUA | 2577 | UAUACUGAAAUCACAUGG | 3612 | Rh | [2718-2735] 3′UTR |
| 2 | CUCUGAGCCUUGUAGAAA | 2578 | UUUCUACAAGGCUCAGAG | 3613 | Rh | [1606-1623] 3′UTR |
| 3 | GGUAAUGAUAAGGAGAAU | 2579 | AUUCUCCUUAUCAUUACC | 3614 | | [2346-2363] 3′UTR |
| 4 | GAUGCUUUGUAUCAUUCU | 2580 | AGAAUGAUACAAAGCAUC | 3615 | | [3589-3606] 3′UTR |
| 5 | GGGUCUGGAGGGAGACGU | 2581 | ACGUCUCCCUCCAGACCC | 3616 | | [1130-1147] 3′UTR |
| 6 | GAUCCAGUAUGAGAUCAA | 2582 | UUGAUCUCAUACUGGAUC | 3617 | Rh, Rb | [505-522] ORF |
| 7 | CUGAGAAGGAUAUAGAGU | 2583 | ACUCUAUAUCCUUCUCAG | 3618 | | [546-563] ORF |
| 8 | GUAUCAUUCUUGAGCAAU | 2584 | AUUGCUCAAGAAUGAUAC | 3619 | | [3597-3614] 3′UTR |
| 9 | GCCUGAGAAGGAUAUAGA | 2585 | UCUAUAUCCUUCUCAGGC | 3620 | | [544-561] ORF |
| 10 | GGCUAGUUCUUGAAGGAG | 2586 | CUCCUUCAAGAACUAGCC | 3621 | | [1544-1561] 3′UTR |
| 11 | GGGUCACAGAGAAGAACA | 2587 | UGUUCUUCUCUGUGACCC | 3622 | Rh | [831-848] ORF |
| 12 | GGAUCUUUGAGUAGGUUC | 2588 | GAACCUACUCAAAGAUCC | 3623 | | [3093-3110] 3′UTR |
| 13 | GGAAGUGGACUCUGGAAA | 2589 | UUUCCAGAGUCCACUUCC | 3624 | | [460-477] ORF |
| 14 | GAACCUGAGUUGCAGAUA | 2590 | UAUCUGCAACUCAGGUUC | 3625 | Rh | [2187-2204] 3′UTR |
| 15 | GGUCCAAGGUCCUCAUCC | 2591 | GGAUGAGGACCUUGGACC | 3626 | | [1149-1166] 3′UTR |
| 16 | GUAUUAGACUUGCACUUU | 2592 | AAAGUGCAAGUCUAAUAC | 3627 | | [2914-2931] 3′UTR |
| 17 | CCUGCAAGCAACUCAAAA | 2593 | UUUUGAGUUGCUUGCAGG | 3628 | | [3343-3360] 3′UTR |
| 18 | GGAGGAAAGAAGGAAUAU | 2594 | AUAUUCCUUCUUUCCUCC | 3629 | Rt | [614-631] ORF |
| 19 | GGAAUAUGAAGUCUGAGA | 2595 | UCUCAGACUUCAUAUUCC | 3630 | Ms | [3508-3525] 3′UTR |
| 20 | GGACGUUGGAGGAAAGAA | 2596 | UUCUUUCCUCCAACGUCC | 3631 | Rt, Ms | [607-624] ORF |
| 21 | CAGUGAGAAGGAAGUGGA | 2597 | UCCACUUCCUUCUCACUG | 3632 | | [451-468] ORF |
| 22 | AGAGGAUCCAGUAUGAGA | 2598 | UCUCAUACUGGAUCCUCU | 3633 | Rh, Rb | [501-518] ORF |
| 23 | GGUCAGUGAGAAGGAAGU | 2599 | ACUUCCUUCUCACUGACC | 3634 | | [448-465] ORF |
| 24 | CUUGGUAGGUAUUAGACU | 2600 | AGUCUAAUACCUACCAAG | 3635 | | [2906-2923] 3′UTR |
| 25 | GGGCAGACUGGGAGGGUA | 2601 | UACCCUCCCAGUCUGCCC | 3636 | Rh | [2619-2636] 3′UTR |
| 26 | CCAGUAUGAGAUCAAGCA | 2602 | UGCUUGAUCUCAUACUGG | 3637 | Rh, Rb, Cw, Dg, Ms | [508-525] ORF |
| 27 | GGGUCUCGCUGGACGUUG | 2603 | CAACGUCCAGCGAGACCC | 3638 | Rt, Ms | [597-614] ORF |
| 28 | GCAGAUAUACCAACUUCU | 2604 | AGAAGUUGGUAUAUCUGC | 3639 | Rh | [2198-2215] 3′UTR |
| 29 | AGACGUGGGUCCAAGGUC | 2605 | GACCUUGGACCCACGUCU | 3640 | | [1142-1159] 3′UTR |
| 30 | CACAGAUCUUGAUGACUU | 2606 | AAGUCAUCAAGAUCUGUG | 3641 | Rh | [2592-2609] 3′UTR |
| 31 | GGAUUGAGUUGCACAGCU | 2607 | AGCUGUGCAACUCAAUCC | 3642 | | [1853-1870] 3′UTR |
| 32 | GGGUCCAAAUUAAUAUGA | 2608 | UCAUAUUAAUUUGGACCC | 3643 | | [1077-1094] 3′UTR |
| 33 | GUGAGAAGGAAGUGGACU | 2609 | AGUCCACUUCCUUCUCAC | 3644 | | [453-470] ORF |
| 34 | ACCUUAGCCUGUUCUAUU | 2610 | AAUAGAACAGGCUAAGGU | 3645 | Rh | [2493-2510] 3′UTR |
| 35 | GGUGCUGGGAACACACAA | 2611 | UUGUGUGUUCCCAGCACC | 3646 | | [3532-3549] 3′UTR |
| 36 | GCAUGUCUCUGAUGCUUU | 2612 | AAAGCAUCAGAGACAUGC | 3647 | | [3579-3596] 3′UTR |
| 37 | GCAAGCAACUCAAAAUAU | 2613 | AUAUUUUGAGUUGCUUGC | 3648 | | [3346-3363] 3′UTR |
| 38 | GGCGUGGUCUUGCAAAAU | 2614 | AUUUUGCAAGACCACGCC | 3649 | | [2463-2480] 3′UTR |
| 39 | CGUCUUUGGUUCUCCAGU | 2615 | ACUGGAGAACCAAAGACG | 3650 | | [3055-3072] 3′UTR |
| 40 | GUUCUCCAGUUCAAAUUA | 2616 | UAAUUUGAACUGGAGAAC | 3651 | | [3063-3080] 3′UTR |
| 41 | AGUAUGAGAUCAAGCAGA | 2617 | UCUGCUUGAUCUCAUACU | 3652 | Rh, Rb, Cw, Dg, Ms | [510-527] ORF |
| 42 | GCCUGUUUUAAGAGACAU | 2618 | AUGUCUCUUAAAACAGGC | 3653 | Rh | [2133-2150] 3′UTR |
| 43 | GGGCCUGAGAAGGAUAUA | 2619 | UAUAUCCUUCUCAGGCCC | 3654 | | [542-559] ORF |
| 44 | GCCUGGAACCAGUGGCUA | 2620 | UAGCCACUGGUUCCAGGC | 3655 | | [1531-1548] 3′UTR |
| 45 | CCAACUUCUGCUUGUAUU | 2621 | AAUACAAGCAGAAGUUGG | 3656 | Rh | [2207-2224] 3′UTR |
| 46 | CGAUAUACAGGCACAUUA | 2622 | UAAUGUGCCUGUAUAUCG | 3657 | | [2403-2420] 3′UTR |
| 47 | GGCCUAUGCAGGUGGAUU | 2623 | AAUCCACCUGCAUAGGCC | 3658 | Rh | [2985-3002] 3′UTR |
| 48 | GGGAGGGUAUCCAGGAAU | 2624 | AUUCCUGGAUACCCUCCC | 3659 | Rh | [2628-2645] 3′UTR |
| 49 | CCUAUUAAUCCUCAGAAU | 2625 | AUUCUGAGGAUUAAUAGG | 3660 | Rh | [1572-1589] 3′UTR |
| 50 | GGGAGACGUGGGUCCAAG | 2626 | CUUGGACCCACGUCUCCC | 3661 | | [1139-1156] 3′UTR |
| 51 | GCUCAAAUACCUUCACAA | 2627 | UUGUGAAGGUAUUUGAGC | 3662 | | [3224-3241] 3′UTR |
| 52 | CCAAGGUCCUCAUCCCAU | 2628 | AUGGGAUGAGGACCUUGG | 3663 | | [1152-1169] 3′UTR |
| 53 | AGUAAGAAGUCCAGCCUA | 2629 | UAGGCUGGACUUCUUACU | 3664 | Rh | [2042-2059] 3′UTR |
| 54 | GGACUGGGUCACAGAGAA | 2630 | UUCUCUGUGACCCAGUCC | 3665 | Rh, Rt, Ms, Pg | [826-843] ORF |
| 55 | AGCUAAGCAUAGUAAGAA | 2631 | UUCUUACUAUGCUUAGCU | 3666 | | [2032-2049] 3′UTR |
| 56 | GGUUUGUUUUUGACAUCA | 2632 | UGAUGUCAAAAACAAACC | 3667 | Rh | [2853-2870] 3′UTR |
| 57 | GGAGUUUCUCGACAUCGA | 2633 | UCGAUGUCGAGAAACUCC | 3668 | Ck, Dg | [937-954] ORF |
| 58 | GAGUCUUUUUGGUCUGCA | 2634 | UGCAGACCAAAAAGACUC | 3669 | | [1667-1684] 3′UTR |
| 59 | AGGAGAAUCUCUUGUUUC | 2635 | GAAACAAGAGAUUCUCCU | 3670 | | [2356-2373] 3′UTR |
| 60 | CGGUAAUGAUAAGGAGAA | 2636 | UUCUCCUUAUCAUUACCG | 3671 | | [2345-2362] 3′UTR |
| 61 | GGUAUUAGACUUGCACUU | 2637 | AAGUGCAAGUCUAAUACC | 3672 | | [2913-2930] 3′UTR |
| 62 | CGGUCAGUGAGAAGGAAG | 2638 | CUUCCUUCUCACUGACCG | 3673 | | [447-464] ORF |
| 63 | GCGGUCAGUGAGAAGGAA | 2639 | UUCCUUCUCACUGACCGC | 3674 | | [446-463] ORF |
| 64 | UCCUGAAGCCAGUGAUAU | 2640 | AUAUCACUGGCUUCAGGA | 3675 | | [2301-2318] 3′UTR |
| 65 | AGAAGAGCCUGAACCACA | 2641 | UGUGGUUCAGGCUCUUCU | 3676 | Rh, Rb, Cw, Ms, Pg | [723-740] ORF |
| 66 | GAAAGAAGGAAUAUCUCA | 2642 | UGAGAUAUUCCUUCUUUC | 3677 | | [618-635] ORF |
| 67 | GCCGUAAUUUAAAGCUCU | 2643 | AGAGCUUUAAAUUACGGC | 3678 | | [3436-3453] 3′UTR |
| 68 | CGUGGACAAUAAACAGUA | 2644 | UACUGUUUAUUGUCCACG | 3679 | | [3624-3641] 3′UTR |
| 69 | GUGAAUUCUCAGAUGAUA | 2645 | UAUCAUCUGAGAAUUCAC | 3680 | | [2166-2183] 3′UTR |
| 70 | GGAACACACAAGAGUUGU | 2646 | ACAACUCUUGUGUGUUCC | 3681 | | [3539-3556] 3′UTR |
| 71 | GAGGAUCCAGUAUGAGAU | 2647 | AUCUCAUACUGGAUCCUC | 3682 | Rh, Rb | [502-519] ORF |
| 72 | UGAGAAGGAUAUAGAGUU | 2648 | AACUCUAUAUCCUUCUCA | 3683 | | [547-564] ORF |
| 73 | GCGUGGUCUUGCAAAAUG | 2649 | CAUUUUGCAAGACCACGC | 3684 | | [2464-2481] 3′UTR |
| 74 | CUGUUUUAAGAGACAUCU | 2650 | AGAUGUCUCUUAAAACAG | 3685 | Rh | [2135-2152] 3′UTR |
| 75 | CCCUCAGUGUGGUUUCCU | 2651 | AGGAAACCACACUGAGGG | 3686 | | [2287-2304] 3′UTR |
| 76 | GAGUUGCAGAUAUACCAA | 2652 | UUGGUAUAUCUGCAACUC | 3687 | Rh | [2193-2210] 3′UTR |
| 77 | CUGGGAACACACAAGAGU | 2653 | ACUCUUGUGUGUUCCCAG | 3688 | | [3536-3553] 3′UTR |
| 78 | GCUGAGUCUUUUUGGUCU | 2654 | AGACCAAAAAGACUCAGC | 3689 | Rh | [1664-1681] 3′UTR |
| 79 | CUGCAUCAAGAGAAGUGA | 2655 | UCACUUCUCUUGAUGCAG | 3690 | Rt, Ms | [877-894] ORF |
| 80 | GAGGAAAGAAGGAAUAUC | 2656 | GAUAUUCCUUCUUUCCUC | 3691 | Rt | [615-632] ORF |
| 81 | GCUGGACGUUGGAGGAAA | 2657 | UUUCCUCCAACGUCCAGC | 3692 | Rt, Ms | [604-621] ORF |
| 82 | GGUGUGGCCUUUAUAUUU | 2658 | AAAUAUAAAGGCCACACC | 3693 | | [3120-3137] 3′UTR |
| 83 | GCAUUUUGCAGAAACUUU | 2659 | AAAGUUUCUGCAAAAUGC | 3694 | Rh | [1334-1351] 3′UTR |
| 84 | GGACCAGUCCAUGUGAUU | 2660 | AAUCACAUGGACUGGUCC | 3695 | Rh | [2710-2727] 3′UTR |
| 85 | CACCUUAGCCUGUUCUAU | 2661 | AUAGAACAGGCUAAGGUG | 3696 | Rh | [2492-2509] 3′UTR |
| 86 | UGAUAAGGAGAAUCUCUU | 2662 | AAGAGAUUCUCCUUAUCA | 3697 | Rh | [2351-2368] 3′UTR |
| 87 | CUCAAAGACUGACAGCCA | 2663 | UGGCUGUCAGUCUUUGAG | 3698 | Rh | [1981-1998] 3′UTR |
| 88 | GGGACAUGGCCCUUGUUU | 2664 | AAACAAGGGCCAUGUCCC | 3699 | | [1407-1424] 3′UTR |
| 89 | CCAUCAAUCCUAUUAAUC | 2665 | GAUUAAUAGGAUUGAUGG | 3700 | Rh | [1564-1581] 3′UTR |
| 90 | GAACCAGUGGCUAGUUCU | 2666 | AGAACUAGCCACUGGUUC | 3701 | | [1536-1553] 3′UTR |
| 91 | AGACAUGGUUGUGGGUCU | 2667 | AGACCCACAACCAUGUCU | 3702 | | [1118-1135] 3′UTR |
| 92 | GUUUAAGAAGGCUCUCCA | 2668 | UGGAGAGCCUUCUUAAAC | 3703 | | [3265-3282] 3′UTR |
| 93 | CUUCCUGUAUGGUGAUAU | 2669 | AUAUCACCAUACAGGAAG | 3704 | | [2786-2803] 3′UTR |
| 94 | GGACCUGGUCAGCACAGA | 2670 | UCUGUGCUGACCAGGUCC | 3705 | Rh | [2580-2597] 3′UTR |
| 95 | GAGACGUGGGUCCAAGGU | 2671 | ACCUUGGACCCACGUCUC | 3706 | | [1141-1158] 3′UTR |
| 96 | GGAACCAGUGGCUAGUUC | 2672 | GAACUAGCCACUGGUUCC | 3707 | | [1535-1552] 3′UTR |
| 97 | GGGCAGCCUGGAACCAGU | 2673 | ACUGGUUCCAGGCUGCCC | 3708 | | [1526-1543] 3′UTR |
| 98 | GCAUCAGGCACCUGGAUU | 2674 | AAUCCAGGUGCCUGAUGC | 3709 | | [1840-1857] 3′UTR |
| 99 | GGCGUUUUGCAAUGCAGA | 2675 | UCUGCAUUGCAAAACGCC | 3710 | Cw, Rt, Ms | [409-426] ORF |
| 100 | CCUCCAACCCAUAUAACA | 2676 | UGUUAUAUGGGUUGGAGG | 3711 | | [2753-2770] 3′UTR |
| 101 | GCCUUUAUAUUUGAUCCA | 2677 | UGGAUCAAAUAUAAAGGC | 3712 | | [3126-3143] 3′UTR |
| 102 | GCACAGAUCUUGAUGACU | 2678 | AGUCAUCAAGAUCUGUGC | 3713 | Rh | [2591-2608] 3′UTR |
| 103 | GUCCCUUUCAUCUUGAGA | 2679 | UCUCAAGAUGAAAGGGAC | 3714 | Rh | [1389-1406] 3′UTR |
| 104 | GGAAGCAUUUGACCCAGA | 2680 | UCUGGGUCAAAUGCUUCC | 3715 | | [2956-2973] 3′UTR |
| 105 | GGCAGACUGGGAGGGUAU | 2681 | AUACCCUCCCAGUCUGCC | 3716 | Rh | [2620-2637] 3′UTR |
| 106 | GCUUUGUAUCAUUCUUGA | 2682 | UCAAGAAUGAUACAAAGC | 3717 | | [3592-3609] 3′UTR |
| 107 | GAGGAAGCCGCUCAAAUA | 2683 | UAUUUGAGCGGCUUCCUC | 3718 | | [3215-3232] 3′UTR |
| 108 | CCUUCUCCUUUUAGACAU | 2684 | AUGUCUAAAAGGAGAAGG | 3719 | | [1106-1123] 3′UTR |
| 109 | GGGCGUGGUCUUGCAAAA | 2685 | UUUUGCAAGACCACGCCC | 3720 | | [2462-2479] 3′UTR |
| 110 | GCUGAGCAGAAAACAAAA | 2686 | UUUUGUUUUCUGCUCAGC | 3721 | | [3166-3183] 3′UTR |
| 111 | GACCAGUCCAUGUGAUUU | 2687 | AAAUCACAUGGACUGGUC | 3722 | Rh | [2711-2728] 3′UTR |
| 112 | GAGAAUCUCUUGUUUCCU | 2688 | AGGAAACAAGAGAUUCUC | 3723 | | [2358-2375] 3′UTR |
| 113 | UCCUAUUAAUCCUCAGAA | 2689 | UUCUGAGGAUUAAUAGGA | 3724 | Rh | [1571-1588] 3′UTR |
| 114 | CACAGAGAAGAACAUCAA | 2690 | UUGAUGUUCUUCUCUGUG | 3725 | Rh | [835-852] ORF |
| 115 | GCCUGCAUCAAGAGAAGU | 2691 | ACUUCUCUUGAUGCAGGC | 3726 | Rt, Ms | [875-892] ORF |
| 116 | GGUGACACACUCACUUCU | 2692 | AGAAGUGAGUGUGUCACC | 3727 | | [2092-2109] 3′UTR |
| 117 | AGGAAAGAAGGAAUAUCU | 2693 | AGAUAUUCCUUCUUUCCU | 3728 | Rt | [616-633] ORF |
| 118 | CCACCUGUGUUGUAAAGA | 2694 | UCUUUACAACACAGGUGG | 3729 | Rh | [2377-2394] 3′UTR |
| 119 | GUCCAUGUGAUUUCAGUA | 2695 | UACUGAAAUCACAUGGAC | 3730 | Rh | [2716-2733] 3′UTR |
| 120 | AGUGGACUCUGGAAACGA | 2696 | UCGUUUCCAGAGUCCACU | 3731 | Rh | [463-480] ORF |
| 121 | GACAUCAGCUGUAAUCAU | 2697 | AUGAUUACAGCUGAUGUC | 3732 | | [2864-2881] 3′UTR |
| 122 | GCCUGUUCUAUUCAGCGG | 2698 | CCGCUGAAUAGAACAGGC | 3733 | | [2499-2516] 3′UTR |
| 123 | AGAUCAAGCAGAUAAAGA | 2699 | UCUUUAUCUGCUUGAUCU | 3734 | Cw, Dg, Rt, Ms | [516-533] ORF |
| 124 | GUCUCUGAUGCUUUGUAU | 2700 | AUACAAAGCAUCAGAGAC | 3735 | | [3583-3600] 3′UTR |
| 125 | GUUCAAAGGGCCUGAGAA | 2701 | UUCUCAGGCCCUUUGAAC | 3736 | | [535-552] ORF |
| 126 | GGGAACUAGGGAACCUAU | 2702 | AUAGGUUCCCUAGUUCCC | 3737 | Rh | [2264-2281] 3′UTR |
| 127 | AUGAUAAGGAGAAUCUCU | 2703 | AGAGAUUCUCCUUAUCAU | 3738 | | [2350-2367] 3′UTR |
| 128 | CUUAGCCUGUUCUAUUCA | 2704 | UGAAUAGAACAGGCUAAG | 3739 | Rh | [2495-2512] 3′UTR |
| 129 | GUAAUGAUAAGGAGAAUC | 2705 | GAUUCUCCUUAUCAUUAC | 3740 | | [2347-2364] 3′UTR |
| 130 | GGACGAGUGCCUCUGGAU | 2706 | AUCCAGAGGCACUCGUCC | 3741 | Rh, Rb, Cw | [808-825] ORF |
| 131 | CACAAUAAAUAGUGGCAA | 2707 | UUGCCACUAUUUAUUGUG | 3742 | | [3237-3254] 3′UTR |
| 132 | GUUGGAGGAAAGAAGGAA | 2708 | UUCCUUCUUUCCUCCAAC | 3743 | Rt | [611-628] ORF |
| 133 | AGGUAUUAGACUUGCACU | 2709 | AGUGCAAGUCUAAUACCU | 3744 | | [2912-2929] 3′UTR |
| 134 | ACACAAGAGUUGUUGAAA | 2710 | UUUCAACAACUCUUGUGU | 3745 | | [3544-3561] 3′UTR |
| 135 | CCUAUGUGUUCCCUCAGU | 2711 | ACUGAGGGAACACAUAGG | 3746 | | [2277-2294] 3′UTR |
| 136 | CAAUGCAGAUGUAGUGAU | 2712 | AUCACUACAUCUGCAUUG | 3747 | | [418-435] ORF |
| 137 | GAAUAUGAAGUCUGAGAC | 2713 | GUCUCAGACUUCAUAUUC | 3748 | | [3509-3526] 3′UTR |
| 138 | CCUCCAAGGGUUUCGACU | 2714 | AGUCGAAACCCUUGGAGG | 3749 | Rh | [1004-1021] 3′UTR |
| 139 | GUGGUUUCCUGAAGCCAG | 2715 | CUGGCUUCAGGAAACCAC | 3750 | | [2295-2312] 3′UTR |
| 140 | UGUUCUAUUCAGCGGCAA | 2716 | UUGCCGCUGAAUAGAACA | 3751 | | [2502-2519] 3′UTR |
| 141 | GAUGAUAGGUGAACCUGA | 2717 | UCAGGUUCACCUAUCAUC | 3752 | | [2177-2194] 3′UTR |
| 142 | GCCUCAGCUGAGUCUUUU | 2718 | AAAAGACUCAGCUGAGGC | 3753 | Rh | [1658-1675] 3′UTR |
| 143 | AGGUGAAUUCUCAGAUGA | 2719 | UCAUCUGAGAAUUCACCU | 3754 | | [2164-2181] 3′UTR |
| 144 | AGGGAGACGUGGGUCCAA | 2720 | UUGGACCCACGUCUCCCU | 3755 | | [1138-1155] 3′UTR |
| 145 | AGAAGGAAGUGGACUCUG | 2721 | CAGAGUCCACUUCCUUCU | 3756 | | [456-473] ORF |
| 146 | GGAAGCCGCUCAAAUACC | 2722 | GGUAUUUGAGCGGCUUCC | 3757 | | [3217-3234] 3′UTR |
| 147 | GCUGUACAGUGACCUAAA | 2723 | UUUAGGUCACUGUACAGC | 3758 | | [2673-2690] 3′UTR |
| 148 | GGAUAGGAAGAACUUUCU | 2724 | AGAAAGUUCUUCCUAUCC | 3759 | | [2327-2344] 3′UTR |
| 149 | CCCUUCUCCUUUUAGACA | 2725 | UGUCUAAAAGGAGAAGGG | 3760 | | [1105-1122] 3′UTR |
| 150 | CCACCUUAGCCUGUUCUA | 2726 | UAGAACAGGCUAAGGUGG | 3761 | Rh | [2491-2508] 3′UTR |
| 151 | GGGCUUCGAUCCUUGGGU | 2727 | ACCCAAGGAUCGAAGCCC | 3762 | Rh | [1198-1215] 3′UTR |
| 152 | AGUGUUCCCUCCCUCAAA | 2728 | UUUGAGGGAGGGAACACU | 3763 | | [1969-1986] 3′UTR |
| 153 | GAACUUUCUCGGUAAUGA | 2729 | UCAUUACCGAGAAAGUUC | 3764 | | [2336-2353] 3′UTR |
| 154 | GAGAAGGAAGUGGACUCU | 2730 | AGAGUCCACUUCCUUCUC | 3765 | | [455-472] ORF |
| 155 | CAUCAAUCCUAUUAAUCC | 2731 | GGAUUAAUAGGAUUGAUG | 3766 | Rh | [1565-1582] 3′UTR |
| 156 | GCAGGAGUUUCUCGACAU | 2732 | AUGUCGAGAAACUCCUGC | 3767 | Ck, Dg | [934-951] ORF |
| 157 | GGGUUAGGAUAGGAAGAA | 2733 | UUCUUCCUAUCCUAACCC | 3768 | | [2321-2338] 3′UTR |
| 158 | CUGAUGCUUUGUAUCAUU | 2734 | AAUGAUACAAAGCAUCAG | 3769 | | [3587-3604] 3′UTR |
| 159 | CAGCCUCAGCUGAGUCUU | 2735 | AAGACUCAGCUGAGGCUG | 3770 | Rh | [1656-1673] 3′UTR |
| 160 | GGCCUGUUUUAAGAGACA | 2736 | UGUCUCUUAAAACAGGCC | 3771 | Rh | [2132-2149] 3′UTR |
| 161 | CAUACACACGCAAUGAAA | 2737 | UUUCAUUGCGUGUGUAUG | 3772 | Rh | [2427-2444] 3′UTR |
| 162 | GCACCACCCAGAAGAAGA | 2738 | UCUUCUUCUGGGUGGUGC | 3773 | Rh, Pg | [711-728] ORF |
| 163 | CUCUGAUGCUUUGUAUCA | 2739 | UGAUACAAAGCAUCAGAG | 3774 | | [3585-3602] 3′UTR |
| 164 | GGGCUUUCUGCAUGUGAC | 2740 | GUCACAUGCAGAAAGCCC | 3775 | | [2011-2028] 3′UTR |
| 165 | CUCUGGAAACGACAUUUA | 2741 | UAAAUGUCGUUUCCAGAG | 3776 | Rh | [469-486] ORF |
| 166 | GAUUGAGUUGCACAGCUU | 2742 | AAGCUGUGCAACUCAAUC | 3777 | | [1854-1871] 3′UTR |
| 167 | GUCAGUGAGAAGGAAGUG | 2743 | CACUUCCUUCUCACUGAC | 3778 | | [449-466] ORF |
| 168 | CCAGCUUGCAGGAGGAAU | 2744 | AUUCCUCCUGCAAGCUGG | 3779 | | [1723-1740] 3′UTR |
| 169 | CCCUGUUCGCUUCCUGUA | 2745 | UACAGGAAGCGAACAGGG | 3780 | | [2777-2794] 3′UTR |
| 170 | CAUGGGUCCAAAUUAAUA | 2746 | UAUUAAUUUGGACCCAUG | 3781 | | [1074-1091] 3′UTR |
| 171 | CUCUGUUGAUUUUGUUUC | 2747 | GAAACAAAAUCAACAGAG | 3782 | | [3450-3467] 3′UTR |
| 172 | GGAAGGAUUUUGGAGGUA | 2748 | UACCUCCAAAAUCCUUCC | 3783 | Rh | [2065-2082] 3′UTR |
| 173 | GGAACUAGGGAACCUAUG | 2749 | CAUAGGUUCCCUAGUUCC | 3784 | Rh | [2265-2282] 3′UTR |
| 174 | CCUGGAUUGAGUUGCACA | 2750 | UGUGCAACUCAAUCCAGG | 3785 | | [1850-1867] 3′UTR |
| 175 | GCCUGGAAAUGUGCAUUU | 2751 | AAAUGCACAUUUCCAGGC | 3786 | Rh | [1322-1339] 3′UTR |
| 176 | GGCCAAAGCGGUCAGUGA | 2752 | UCACUGACCGCUUUGGCC | 3787 | | [439-456] ORF |
| 177 | ACUUCUGCUUGUAUUUCU | 2753 | AGAAAUACAAGCAGAAGU | 3788 | Rh | [2210-2227] 3′UTR |
| 178 | CCCUUUCUAGGGCAGACU | 2754 | AGUCUGCCCUAGAAAGGG | 3789 | Rh | [2610-2627] 3′UTR |
| 179 | CCUGGUCAGCACAGAUCU | 2755 | AGAUCUGUGCUGACCAGG | 3790 | Rh | [2583-2600] 3′UTR |
| 180 | GGGUCCAAGGUCCUCAUC | 2756 | GAUGAGGACCUUGGACCC | 3791 | | [1148-1165] 3′UTR |
| 181 | CUGUAUGGUGAUAUCAUA | 2757 | UAUGAUAUCACCAUACAG | 3792 | | [2790-2807] 3′UTR |
| 182 | UGGACUUGCUGCCGUAAU | 2758 | AUUACGGCAGCAAGUCCA | 3793 | | [3426-3443] 3′UTR |
| 183 | CCUGUUCGCUUCCUGUAU | 2759 | AUACAGGAAGCGAACAGG | 3794 | | [2778-2795] 3′UTR |
| 184 | GUGACACACUCACUUCUU | 2760 | AAGAAGUGAGUGUGUCAC | 3795 | | [2093-2110] 3′UTR |
| 185 | GGUGGAUUCCUUCAGGUC | 2761 | GACCUGAAGGAAUCCACC | 3796 | Rh | [2995-3012] 3′UTR |
| 186 | CCCAUCAAUCCUAUUAAU | 2762 | AUUAAUAGGAUUGAUGGG | 3797 | Rh | [1563-1580] 3′UTR |
| 187 | GCUAGUUCUUGAAGGAGC | 2763 | GCUCCUUCAAGAACUAGC | 3798 | | [1545-1562] 3′UTR |
| 188 | GUGGGUCCAAGGUCCUCA | 2764 | UGAGGACCUUGGACCCAC | 3799 | | [1146-1163] 3′UTR |
| 189 | GCUUCCAAAGCCACCUUA | 2765 | UAAGGUGGCUUUGGAAGC | 3800 | Rh | [2481-2498] 3′UTR |
| 190 | GGUCACAGAGAAGAACAU | 2766 | AUGUUCUUCUCUGUGACC | 3801 | Rh | [832-849] ORF |
| 191 | GCAUCAAGAGAAGUGACG | 2767 | CGUCACUUCUCUUGAUGC | 3802 | | [879-896] ORF |
| 192 | UGGUCUUGCAAAAUGCUU | 2768 | AAGCAUUUUGCAAGACCA | 3803 | | [2467-2484] 3′UTR |
| 193 | AGCAGGAGUUUCUCGACA | 2769 | UGUCGAGAAACUCCUGCU | 3804 | Ck, Dg | [933-950] ORF |
| 194 | GUUGAAAGUUGACAAGCA | 2770 | UGCUUGUCAACUUUCAAC | 3805 | | [3555-3572] 3′UTR |
| 195 | GGUCUUGCAAAAUGCUUC | 2771 | GAAGCAUUUUGCAAGACC | 3806 | | [2468-2485] 3′UTR |
| 196 | GUGUUUAUGCUGGAAUAU | 2772 | AUAUUCCAGCAUAAACAC | 3807 | | [3497-3514] 3′UTR |
| 197 | GCAGAAAACAAAACAGGU | 2773 | ACCUGUUUUGUUUUCUGC | 3808 | | [3171-3188] 3′UTR |
| 198 | ACCUAAAGUUGGUAAGAU | 2774 | AUCUUACCAACUUUAGGU | 3809 | | [2684-2701] 3′UTR |
| 199 | AGCAGACUGCGCAUGUCU | 2775 | AGACAUGCGCAGUCUGCU | 3810 | | [3569-3586] 3′UTR |
| 200 | AGCCUGUUCUAUUCAGCG | 2776 | CGCUGAAUAGAACAGGCU | 3811 | | [2498-2515] 3′UTR |
| 201 | GGCAGCACUUAGGGAUCU | 2777 | AGAUCCCUAAGUGCUGCC | 3812 | Rh | [1284-1301] 3′UTR |
| 202 | CAUUUAUGGCAACCCUAU | 2778 | AUAGGGUUGCCAUAAAUG | 3813 | | [481-498] ORF |
| 203 | GGCUCUCCAUUUGGCAUC | 2779 | GAUGCCAAAUGGAGAGCC | 3814 | | [3274-3291] 3′UTR |
| 204 | UGUUUCUGCUGAUUGUUU | 2780 | AAACAAUCAGCAGAAACA | 3815 | | [2823-2840] 3′UTR |
| 205 | GCUGCGAGUGCAAGAUCA | 2781 | UGAUCUUGCACUCGCAGC | 3816 | Rt | [753-770] ORF |
| 206 | CUUUCUCGGUAAUGAUAA | 2782 | UUAUCAUUACCGAGAAAG | 3817 | | [2339-2356] 3′UTR |
| 207 | GUUUCCGUUUGGAUUUUU | 2783 | AAAAAUCCAAACGGAAAC | 3818 | | [3463-3480] 3′UTR |
| 208 | GGGCUGCGAGUGCAAGAU | 2784 | AUCUUGCACUCGCAGCCC | 3819 | Ck, Rb, Rt | [751-768] ORF |
| 209 | CCUGAGUUGCAGAUAUAC | 2785 | GUAUAUCUGCAACUCAGG | 3820 | Rh | [2190-2207] 3′UTR |
| 210 | GUUUCCUGAAGCCAGUGA | 2786 | UCACUGGCUUCAGGAAAC | 3821 | | [2298-2315] 3′UTR |
| 211 | GGAUUUUGGAGGUAGGUG | 2787 | CACCUACCUCCAAAAUCC | 3822 | Rh | [2069-2086] 3′UTR |
| 212 | GCAAAAAAAGCCUCCAAG | 2788 | CUUGGAGGCUUUUUUUGC | 3823 | | [994-1011] 3′UTR |
| 213 | CCAAGUUCUUCGCCUGCA | 2789 | UGCAGGCGAAGAACUUGG | 3824 | Rh, Rb, Cw, Dg, Ms | [864-881] ORF |
| 214 | GUUCCCUCAGUGUGGUUU | 2790 | AAACCACACUGAGGGAAC | 3825 | | [2284-2301] 3′UTR |
| 215 | GGAGCACUGUGUUUAUGC | 2791 | GCAUAAACACAGUGCUCC | 3826 | | [3489-3506] 3′UTR |
| 216 | UAAGAAGGCUCUCCAUUU | 2792 | AAAUGGAGAGCCUUCUUA | 3827 | | [3268-3285] 3′UTR |
| 217 | GCGUUUUCAUGCUGUACA | 2793 | UGUACAGCAUGAAAACGC | 3828 | Rh | [2663-2680] 3′UTR |
| 218 | GGUUCGGUCUGAAAGGUG | 2794 | CACCUUUCAGACCGAACC | 3829 | | [3106-3123] 3′UTR |
| 219 | GAUUACCUAGCUAAGAAA | 2795 | UUUCUUAGCUAGGUAAUC | 3830 | | [2239-2256] 3′UTR |
| 220 | CUUUCAUCUUGAGAGGGA | 2796 | UCCCUCUCAAGAUGAAAG | 3831 | | [1393-1410] 3′UTR |
| 221 | AGGGCAGCCUGGAACCAG | 2797 | CUGGUUCCAGGCUGCCCU | 3832 | | [1525-1542] 3′UTR |
| 222 | GGGACACGCGGCUUCCCU | 2798 | AGGGAAGCCGCGUGUCCC | 3833 | | [1228-1245] 3′UTR |
| 223 | CCUAGGAAGGGAAGGAUU | 2799 | AAUCCUUCCCUUCCUAGG | 3834 | Rh | [2056-2073] 3′UTR |
| 224 | CCAAGGGCAGCCUGGAAC | 2800 | GUUCCAGGCUGCCCUUGG | 3835 | | [1522-1539] 3′UTR |
| 225 | AUAUGAAGUCUGAGACCU | 2801 | AGGUCUCAGACUUCAUAU | 3836 | | [3511-3528] 3′UTR |
| 226 | GGACUCUGGAAACGACAU | 2802 | AUGUCGUUUCCAGAGUCC | 3837 | Rh | [466-483] ORF |
| 227 | CCUGAAGCCAGUGAUAUG | 2803 | CAUAUCACUGGCUUCAGG | 3838 | | [2302-2319] 3′UTR |
| 228 | GGACUUGCUGCCGUAAUU | 2804 | AAUUACGGCAGCAAGUCC | 3839 | | [3427-3444] 3′UTR |
| 229 | ACGGCAAGAUGCACAUCA | 2805 | UGAUGUGCAUCUUGCCGU | 3840 | Dg, Pg | [657-674] ORF |
| 230 | CAAGAGUUGUUGAAAGUU | 2806 | AACUUUCAACAACUCUUG | 3841 | | [3547-3564] 3′UTR |
| 231 | GGUCAGCACAGAUCUUGA | 2807 | UCAAGAUCUGUGCUGACC | 3842 | Rh | [2586-2603] 3′UTR |
| 232 | AGGGAACUAGGGAACCUA | 2808 | UAGGUUCCCUAGUUCCCU | 3843 | Rh | [2263-2280] 3′UTR |
| 233 | CGGACGAGUGCCUCUGGA | 2809 | UCCAGAGGCACUCGUCCG | 3844 | Rh, Rb, Cw | [807-824] ORF |
| 234 | CUCCAGUUCAAAUUAUUG | 2810 | CAAUAAUUUGAACUGGAG | 3845 | | [3066-3083] 3′UTR |
| 235 | CAUGGUUGUGGGUCUGGA | 2811 | UCCAGACCCACAACCAUG | 3846 | | [1121-1138] 3′UTR |
| 236 | AGGUGAACCUGAGUUGCA | 2812 | UGCAACUCAGGUUCACCU | 3847 | Rh | [2183-2200] 3′UTR |
| 237 | GGUGAGGUCCUGUCCUGA | 2813 | UCAGGACAGGACCUCACC | 3848 | Rh | [1742-1759] 3′UTR |
| 238 | CAGUGUGGUUUCCUGAAG | 2814 | CUUCAGGAAACCACACUG | 3849 | | [2291-2308] 3′UTR |
| 239 | GAAGAAGAGCCUGAACCA | 2815 | UGGUUCAGGCUCUUCUUC | 3850 | Rh, Rb, Cw, Ms, Pg | [721-738] ORF |
| 240 | GGUAGGUGGCUUUGGUGA | 2816 | UCACCAAAGCCACCUACC | 3851 | Rh | [2079-2096] 3′UTR |
| 241 | CCCUCAAGGUCCCUUCCC | 2817 | GGGAAGGGACCUUGAGGG | 3852 | | [1785-1802] 3′UTR |
| 242 | UCGCCUGCAUCAAGAGAA | 2818 | UUCUCUUGAUGCAGGCGA | 3853 | Rh, Cw, Dg, Ms | [873-890] ORF |
| 243 | AGCAUUUGACCCAGAGUG | 2819 | CACUCUGGGUCAAAUGCU | 3854 | | [2959-2976] 3′UTR |
| 244 | GGGUCUUGCUGUGCCCUC | 2820 | GAGGGCACAGCAAGACCC | 3855 | Rh | [1943-1960] 3′UTR |
| 245 | GCCUCCUGCUGCUGGCGA | 2821 | UCGCCAGCAGCAGGAGGC | 3856 | Dg | [339-356] ORF |
| 246 | CAGGCUUAGUGUUCCCUC | 2822 | GAGGGAACACUAAGCCUG | 3857 | | [1962-1979] 3′UTR |
| 247 | CCAGAAGAAGAGCCUGAA | 2823 | UUCAGGCUCUUCUUCUGG | 3858 | Rh, Rb, Cw, Ms, Pg | [718-735] ORF |
| 248 | GACCCAGAGUGGAACGCG | 2824 | CGCGUUCCACUCUGGGUC | 3859 | | [2966-2983] 3′UTR |
| 249 | AGGUGUGGCCUUUAUAUU | 2825 | AAUAUAAAGGCCACACCU | 3860 | | [3119-3136] 3′UTR |
| 250 | CAGUGGGAGCCUCCCUCU | 2826 | AGAGGGAGGCUCCCACUG | 3861 | Rh | [1592-1609] 3′UTR |
| 251 | UGGUUCUCCAGUUCAAAU | 2827 | AUUUGAACUGGAGAACCA | 3862 | | [3061-3078] 3′UTR |
| 252 | GGUUAAGAAGAGCCGGGU | 2828 | ACCCGGCUCUUCUUAACC | 3863 | | [3186-3203] 3′UTR |
| 253 | AAGGAGAAUCUCUUGUUU | 2829 | AAACAAGAGAUUCUCCUU | 3864 | | [2355-2372] 3′UTR |
| 254 | UCUGAUGCUUUGUAUCAU | 2830 | AUGAUACAAAGCAUCAGA | 3865 | | [3586-3603] 3′UTR |
| 255 | CCAGGUCCCUUUCAUCUU | 2831 | AAGAUGAAAGGGACCUGG | 3866 | Rh | [1385-1402] 3′UTR |
| 256 | CACCCUCUGUGACUUCAU | 2832 | AUGAAGUCACAGAGGGUG | 3867 | Rh, Cw, Ms | [673-690] ORF |
| 257 | CCCUUGGUAGGUAUUAGA | 2833 | UCUAAUACCUACCAAGGG | 3868 | | [2904-2921] 3′UTR |
| 258 | CUAUGUGUUCCCUCAGUG | 2834 | CACUGAGGGAACACAUAG | 3869 | | [2278-2295] 3′UTR |
| 259 | GAGCCUGAACCACAGGUA | 2835 | UACCUGUGGUUCAGGCUC | 3870 | Rh, Rb, Cw, Ms, Pg | [727-744] ORF |
| 260 | GGCAAGUGCUCCCAUCGC | 2836 | GCGAUGGGAGCACUUGCC | 3871 | | [1460-1477] 3′UTR |
| 261 | GAAUUCCAGUGGGAGCCU | 2837 | AGGCUCCCACUGGAAUUC | 3872 | Rh | [1586-1603] 3′UTR |
| 262 | GCAAUGCAGAUGUAGUGA | 2838 | UCACUACAUCUGCAUUGC | 3873 | | [417-434] ORF |
| 263 | CCUGAGAAGGAUAUAGAG | 2839 | CUCUAUAUCCUUCUCAGG | 3874 | | [545-562] ORF |
| 264 | ACCUGAGUUGCAGAUAUA | 2840 | UAUAUCUGCAACUCAGGU | 3875 | Rh | [2189-2206] 3′UTR |
| 265 | GACCUAAAGUUGGUAAGA | 2841 | UCUUACCAACUUUAGGUC | 3876 | | [2683-2700] 3′UTR |
| 266 | GUCUUUGGUUCUCCAGUU | 2842 | AACUGGAGAACCAAAGAC | 3877 | | [3056-3073] 3′UTR |
| 267 | GCCUAGGAAGGGAAGGAU | 2843 | AUCCUUCCCUUCCUAGGC | 3878 | Rh | [2055-2072] 3′UTR |
| 268 | CGCAUGUCUCUGAUGCUU | 2844 | AAGCAUCAGAGACAUGCG | 3879 | | [3578-3595] 3′UTR |
| 269 | CAAUCCUAUUAAUCCUCA | 2845 | UGAGGAUUAAUAGGAUUG | 3880 | Rh | [1568-1585] 3′UTR |
| 270 | AGCCUCAGCUGAGUCUUU | 2846 | AAAGACUCAGCUGAGGCU | 3881 | Rh | [1657-1674] 3′UTR |
| 271 | GCUCUGUUGAUUUUGUUU | 2847 | AAACAAAAUCAACAGAGC | 3882 | | [3449-3466] 3′UTR |
| 272 | GUGGGAGCCUCCCUCUGA | 2848 | UCAGAGGGAGGCUCCCAC | 3883 | Rh | [1594-1611] 3′UTR |
| 273 | GACUCUGGAAACGACAUU | 2849 | AAUGUCGUUUCCAGAGUC | 3884 | Rh | [467-484] ORF |
| 274 | AGCAUAGUAAGAAGUCCA | 2850 | UGGACUUCUUACUAUGCU | 3885 | | [2037-2054] 3′UTR |
| 275 | CAGAGGAAGCCGCUCAAA | 2851 | UUUGAGCGGCUUCCUCUG | 3886 | | [3213-3230] 3′UTR |
| 276 | GUUGGUAAGAUGUCAUAA | 2852 | UUAUGACAUCUUACCAAC | 3887 | Rh | [2691-2708] 3′UTR |
| 277 | CUAUUUUCAUCCUGCAAG | 2853 | CUUGCAGGAUGAAAAUAG | 3888 | | [3333-3350] 3′UTR |
| 278 | AGUUGCAGAUAUACCAAC | 2854 | GUUGGUAUAUCUGCAACU | 3889 | Rh | [2194-2211] 3′UTR |
| 279 | AAUGAUAAGGAGAAUCUC | 2855 | GAGAUUCUCCUUAUCAUU | 3890 | | [2349-2366] 3′UTR |
| 280 | GGAGAAUCUCUUGUUUCC | 2856 | GGAAACAAGAGAUUCUCC | 3891 | | [2357-2374] 3′UTR |
| 281 | GUAAGAUGUCAUAAUGGA | 2857 | UCCAUUAUGACAUCUUAC | 3892 | Rh | [2695-2712] 3′UTR |
| 282 | CCUUGGUAGGUAUUAGAC | 2858 | GUCUAAUACCUACCAAGG | 3893 | | [2905-2922] 3′UTR |
| 283 | GGCUGGGACACGCGGCUU | 2859 | AAGCCGCGUGUCCCAGCC | 3894 | | [1224-1241] 3′UTR |
| 284 | CACAAGAGUUGUUGAAAG | 2860 | CUUUCAACAACUCUUGUG | 3895 | | [3545-3562] 3′UTR |
| 285 | GAGGGUCGUUGCAAGACU | 2861 | AGUCUUGCAACGACCCUC | 3896 | | [1353-1370] 3′UTR |
| 286 | AAACGACAUUUAUGGCAA | 2862 | UUGCCAUAAAUGUCGUUU | 3897 | | [475-492] ORF |
| 287 | UGAUGACUUCCCUUUCUA | 2863 | UAGAAAGGGAAGUCAUCA | 3898 | Rh | [2601-2618] 3′UTR |
| 288 | GGCUUAGUGUUCCCUCCC | 2864 | GGGAGGGAACACUAAGCC | 3899 | | [1964-1981] 3′UTR |
| 289 | CAGAGAAGAACAUCAACG | 2865 | CGUUGAUGUUCUUCUCUG | 3900 | Rh | [837-854] ORF |
| 290 | CCAGCCUCAGCUGAGUCU | 2866 | AGACUCAGCUGAGGCUGG | 3901 | Rh | [1655-1672] 3′UTR |
| 291 | GGGACACCCUGAGCACCA | 2867 | UGGUGCUCAGGGUGUCCC | 3902 | Rh, Pg | [699-716] ORF |
| 292 | CUCACUUCUUUCUCAGCC | 2868 | GGCUGAGAAAGAAGUGAG | 3903 | | [2101-2118] 3′UTR |
| 293 | GACAUCCCUUCCUGGAAA | 2869 | UUUCCAGGAAGGGAUGUC | 3904 | Rh, Rt, Ms | [1033-1050] 3′UTR |
| 294 | CCUGGCAAGUGCUCCCAU | 2870 | AUGGGAGCACUUGCCAGG | 3905 | | [1457-1474] 3′UTR |
| 295 | AGAAAUGGGAGCGAGAAA | 2871 | UUUCUCGCUCCCAUUUCU | 3906 | | [1619-1636] 3′UTR |
| 296 | GCAAUGAAACCGAAGCUU | 2872 | AAGCUUCGGUUUCAUUGC | 3907 | | [2436-2453] 3′UTR |
| 297 | AUGUCAUAAUGGACCAGU | 2873 | ACUGGUCCAUUAUGACAU | 3908 | Rh | [2700-2717] 3′UTR |
| 298 | UGUGGUUUCCUGAAGCCA | 2874 | UGGCUUCAGGAAACCACA | 3909 | | [2294-2311] 3′UTR |
| 299 | GAUAUACAGGCACAUUAU | 2875 | AUAAUGUGCCUGUAUAUC | 3910 | | [2404-2421] 3′UTR |
| 300 | AAAAAAGCCUCCAAGGGU | 2876 | ACCCUUGGAGGCUUUUUU | 3911 | | [997-1014] 3′UTR |
| 301 | GUAUGGUGAUAUCAUAUG | 2877 | CAUAUGAUAUCACCAUAC | 3912 | | [2792-2809] 3′UTR |
| 302 | CCUGUGCUGUGUUUUUUA | 2878 | UAAAAAACACAGCACAGG | 3913 | Rh | [2883-2900] 3′UTR |
| 303 | AGGCCAAGUUCUUCGCCU | 2879 | AGGCGAAGAACUUGGCCU | 3914 | Rh, Rb, Cw, Dg, Ms | [861-878] ORF |
| 304 | UGCAGAUAUACCAACUUC | 2880 | GAAGUUGGUAUAUCUGCA | 3915 | Rh | [2197-2214] 3′UTR |
| 305 | AGAAGGAAUAUCUCAUUG | 2881 | CAAUGAGAUAUUCCUUCU | 3916 | | [621-638] ORF |
| 306 | GAAGGAUUUUGGAGGUAG | 2882 | CUACCUCCAAAAUCCUUC | 3917 | Rh | [2066-2083] 3′UTR |
| 307 | GCGGCUUCCCUCCCAGUC | 2883 | GACUGGGAGGGAAGCCGC | 3918 | | [1235-1252] 3′UTR |
| 308 | CUCAGAAUUCCAGUGGGA | 2884 | UCCCACUGGAAUUCUGAG | 3919 | Rh | [1582-1599] 3′UTR |
| 309 | GAUGGACUGGGUCACAGA | 2885 | UCUGUGACCCAGUCCAUC | 3920 | Rh, Rt, Ms, Pg | [823-840] ORF |
| 310 | AUAUCUCAUUGCAGGAAA | 2886 | UUUCCUGCAAUGAGAUAU | 3921 | | [628-645] ORF |
| 311 | ACAUUUAUGGCAACCCUA | 2887 | UAGGGUUGCCAUAAAUGU | 3922 | | [480-497] ORF |
| 312 | UUAAGAAGGCUCUCCAUU | 2888 | AAUGGAGAGCCUUCUUAA | 3923 | | [3267-3284] 3′UTR |
| 313 | GCAAAAUGCUUCCAAAGC | 2889 | GCUUUGGAAGCAUUUUGC | 3924 | Rh | [2474-2491] 3′UTR |
| 314 | CUCCCUCAAAGACUGACA | 2890 | UGUCAGUCUUUGAGGGAG | 3925 | Rh | [1977-1994] 3′UTR |
| 315 | GCCUCUGGAUGGACUGGG | 2891 | CCCAGUCCAUCCAGAGGC | 3926 | Rh, Rb, Cw, Dg, Rt, Ms | [816-833] ORF |
| 316 | CGUUGGUCUUUUAACCGU | 2892 | ACGGUUAAAAGACCAACG | 3927 | | [3148-3165] 3′UTR |
| 317 | AGGAAUAUCUCAUUGCAG | 2893 | CUGCAAUGAGAUAUUCCU | 3928 | | [624-641] ORF |
| 318 | GAGUUUAUCUACACGGCC | 2894 | GGCCGUGUAGAUAAACUC | 3929 | Ms, Pg | [560-577] ORF |
| 319 | UUUUCAUCCUGCAAGCAA | 2895 | UUGCUUGCAGGAUGAAAA | 3930 | | [3336-3353] 3′UTR |
| 320 | CAAAGCGGUCAGUGAGAA | 2896 | UUCUCACUGACCGCUUUG | 3931 | | [442-459] ORF |
| 321 | GUUUCUGCUGAUUGUUUU | 2897 | AAAACAAUCAGCAGAAAC | 3932 | | [2824-2841] 3′UTR |
| 322 | AAAGGUGAAUUCUCAGAU | 2898 | AUCUGAGAAUUCACCUUU | 3933 | | [2162-2179] 3′UTR |
| 323 | GAGUGCCUCUGGAUGGAC | 2899 | GUCCAUCCAGAGGCACUC | 3934 | Rh, Rb, Cw, Dg, Rt, Ms | [812-829] ORF |
| 324 | CAAAGAUUACCUAGCUAA | 2900 | UUAGCUAGGUAAUCUUUG | 3935 | | [2235-2252] 3′UTR |
| 325 | CCAGCUCUGACAUCCCUU | 2901 | AAGGGAUGUCAGAGCUGG | 3936 | Rh | [1025-1042] 3′UTR |
| 326 | GUUCUUCGCCUGCAUCAA | 2902 | UUGAUGCAGGCGAAGAAC | 3937 | Rh, Rb, Cw, Dg, Ms | [868-885] ORF |
| 327 | GGCUCCUGUGCGUGGUAC | 2903 | GUACCACGCACAGGAGCC | 3938 | Rh | [896-913] ORF |
| 328 | UAGACAUGGUUGUGGGUC | 2904 | GACCCACAACCAUGUCUA | 3939 | | [1117-1134] 3′UTR |
| 329 | AGAAGUCCAGCCUAGGAA | 2905 | UUCCUAGGCUGGACUUCU | 3940 | Rh | [2046-2063] 3′UTR |
| 330 | GCAAGACUGUGUAGCAGG | 2906 | CCUGCUACACAGUCUUGC | 3941 | Rh | [1363-1380] 3′UTR |
| 331 | GCUCUCUUCUCCUAUUUU | 2907 | AAAAUAGGAGAAGAGAGC | 3942 | | [3322-3339] 3′UTR |
| 332 | GGCAAGAUGCACAUCACC | 2908 | GGUGAUGUGCAUCUUGCC | 3943 | Rh, Dg | [659-676] ORF |
| 333 | GAAGAACUUUCUCGGUAA | 2909 | UUACCGAGAAAGUUCUUC | 3944 | Rh | [2333-2350] 3′UTR |
| 334 | AGAGUUGUUGAAAGUUGA | 2910 | UCAACUUUCAACAACUCU | 3945 | | [3549-3566] 3′UTR |
| 335 | GUAUAUACAACUCCACCA | 2911 | UGGUGGAGUUGUAUAUAC | 3946 | Rh | [2731-2748] 3′UTR |
| 336 | GCUUAGUGUUCCCUCCCU | 2912 | AGGGAGGGAACACUAAGC | 3947 | | [1965-1982] 3′UTR |
| 337 | GCUCUGACAUCCCUUCCU | 2913 | AGGAAGGGAUGUCAGAGC | 3948 | Rh | [1028-1045] 3′UTR |
| 338 | CCCAUGGGUCCAAAUUAA | 2914 | UUAAUUUGGACCCAUGGG | 3949 | | [1072-1089] 3′UTR |
| 339 | UGGCCAACUGCAAAAAAA | 2915 | UUUUUUUGCAGUUGGCCA | 3950 | | [985-1002] 3′UTR |
| 340 | GGACACUAUGGCCUGUUU | 2916 | AAACAGGCCAUAGUGUCC | 3951 | | [2123-2140] 3′UTR |
| 341 | GCCAGCUAAGCAUAGUAA | 2917 | UUACUAUGCUUAGCUGGC | 3952 | | [2029-2046] 3′UTR |
| 342 | CCAAGGGUUUCGACUGGU | 2918 | ACCAGUCGAAACCCUUGG | 3953 | Rh | [1007-1024] 3′UTR |
| 343 | AGAUGCACAUCACCCUCU | 2919 | AGAGGGUGAUGUGCAUCU | 3954 | Rh | [663-680] ORF |
| 344 | GGCAGGGCCUGGAAAUGU | 2920 | ACAUUUCCAGGCCCUGCC | 3955 | | [1316-1333] 3′UTR |
| 345 | GGUCCUCAUCCCAUCCUC | 2921 | GAGGAUGGGAUGAGGACC | 3956 | Rh | [1156-1173] 3′UTR |
| 346 | CGACAUUUAUGGCAACCC | 2922 | GGGUUGCCAUAAAUGUCG | 3957 | | [478-495] ORF |
| 347 | GCCUUGUAGAAAUGGGAG | 2923 | CUCCCAUUUCUACAAGGC | 3958 | Rh | [1612-1629] 3′UTR |
| 348 | CAGUCCAUGUGAUUUCAG | 2924 | CUGAAAUCACAUGGACUG | 3959 | Rh | [2714-2731] 3′UTR |
| 349 | GGAGACGUGGGUCCAAGG | 2925 | CCUUGGACCCACGUCUCC | 3960 | | [1140-1157] 3′UTR |
| 350 | CAGCUUUGCUUUAUCCGG | 2926 | CCGGAUAAAGCAAAGCUG | 3961 | | [1866-1883] 3′UTR |
| 351 | UGCAAGCAACUCAAAAUA | 2927 | UAUUUUGAGUUGCUUGCA | 3962 | | [3345-3362] 3′UTR |
| 352 | CCUUUCUAGGGCAGACUG | 2928 | CAGUCUGCCCUAGAAAGG | 3963 | Rh | [2611-2628] 3′UTR |
| 353 | CCUGGAAAUGUGCAUUUU | 2929 | AAAAUGCACAUUUCCAGG | 3964 | Rh | [1323-1340] 3′UTR |
| 354 | AUGGCAACCCUAUCAAGA | 2930 | UCUUGAUAGGGUUGCCAU | 3965 | | [486-503] ORF |
| 355 | GCCAUUGCUUCUUGCCUG | 2931 | CAGGCAAGAAGCAAUGGC | 3966 | | [1817-1834] 3′UTR |
| 356 | GGAACCUAUGUGUUCCCU | 2932 | AGGGAACACAUAGGUUCC | 3967 | Rh | [2273-2290] 3′UTR |
| 357 | GAUAUACCAACUUCUGCU | 2933 | AGCAGAAGUUGGUAUAUC | 3968 | Rh | [2201-2218] 3′UTR |
| 358 | GUUUGUUUUUGACAUCAG | 2934 | CUGAUGUCAAAAACAAAC | 3969 | | [2854-2871] 3′UTR |
| 359 | UGCACAGCUUUGCUUUAU | 2935 | AUAAAGCAAAGCUGUGCA | 3970 | | [1862-1879] 3′UTR |
| 360 | CCUAUUUUCAUCCUGCAA | 2936 | UUGCAGGAUGAAAAUAGG | 3971 | | [3332-3349] 3′UTR |
| 361 | UGCCAUUGCUUCUUGCCU | 2937 | AGGCAAGAAGCAAUGGCA | 3972 | | [1816-1833] 3′UTR |
| 362 | ACCAACUUCUGCUUGUAU | 2938 | AUACAAGCAGAAGUUGGU | 3973 | Rh | [2206-2223] 3′UTR |
| 363 | GGUCCUGUCCUGAGGCUG | 2939 | CAGCCUCAGGACAGGACC | 3974 | Rh | [1747-1764] 3′UTR |
| 364 | AUGCAGAUGUAGUGAUCA | 2940 | UGAUCACUACAUCUGCAU | 3975 | | [420-437] ORF |
| 365 | GCUAAGCAUAGUAAGAAG | 2941 | CUUCUUACUAUGCUUAGC | 3976 | | [2033-2050] 3′UTR |
| 366 | GUUCCCUCCCUCAAAGAC | 2942 | GUCUUUGAGGGAGGGAAC | 3977 | | [1972-1989] 3′UTR |
| 367 | AGCUGUAAUCAUUCCUGU | 2943 | ACAGGAAUGAUUACAGCU | 3978 | | [2870-2887] 3′UTR |
| 368 | GCAUGUGACGCCAGCUAA | 2944 | UUAGCUGGCGUCACAUGC | 3979 | | [2020-2037] 3′UTR |
| 369 | GCACAGCUUUGCUUUAUC | 2945 | GAUAAAGCAAAGCUGUGC | 3980 | | [1863-1880] 3′UTR |
| 370 | GAGCCUCCCUCUGAGCCU | 2946 | AGGCUCAGAGGGAGGCUC | 3981 | Rh | [1598-1615] 3′UTR |
| 371 | GGCACCAGGCCAAGUUCU | 2947 | AGAACUUGGCCUGGUGCC | 3982 | Rh, Rb, Rt, Ms | [855-872] ORF |
| 372 | CAGCACAGAUCUUGAUGA | 2948 | UCAUCAAGAUCUGUGCUG | 3983 | Rh | [2589-2606] 3′UTR |
| 373 | UGUUCUAAGCACAGCUCU | 2949 | AGAGCUGUGCUUAGAACA | 3984 | | [3309-3326] 3′UTR |
| 374 | UGAGCAGAAAACAAAACA | 2950 | UGUUUUGUUUUCUGCUCA | 3985 | | [3168-3185] 3′UTR |
| 375 | GGGAACACACAAGAGUUG | 2951 | CAACUCUUGUGUGUUCCC | 3986 | | [3538-3555] 3′UTR |
| 376 | CCCUCAAAGACUGACAGC | 2952 | GCUGUCAGUCUUUGAGGG | 3987 | Rh | [1979-1996] 3′UTR |
| 377 | CCUUGUUUUCUGCAGCUU | 2953 | AAGCUGCAGAAAACAAGG | 3988 | Rh | [1417-1434] 3′UTR |
| 378 | CUGGAAACGACAUUUAUG | 2954 | CAUAAAUGUCGUUUCCAG | 3989 | | [471-488] ORF |
| 379 | GCAAGAUGCACAUCACCC | 2955 | GGGUGAUGUGCAUCUUGC | 3990 | Rh, Dg | [660-677] ORF |
| 380 | UCAGAAUUCCAGUGGGAG | 2956 | CUCCCACUGGAAUUCUGA | 3991 | Rh | [1583-1600] 3′UTR |
| 381 | UGUUGAUUUUGUUUCCGU | 2957 | ACGGAAACAAAAUCAACA | 3992 | | [3453-3470] 3′UTR |
| 382 | UGCUGGAAUAUGAAGUCU | 2958 | AGACUUCAUAUUCCAGCA | 3993 | Ms | [3504-3521] 3′UTR |
| 383 | GUUGUUGAAAGUUGACAA | 2959 | UUGUCAACUUUCAACAAC | 3994 | | [3552-3569] 3′UTR |
| 384 | GGUCGUUGCAAGACUGUG | 2960 | CACAGUCUUGCAACGACC | 3995 | | [1356-1373] 3′UTR |
| 385 | GUAGGUAUUAGACUUGCA | 2961 | UGCAAGUCUAAUACCUAC | 3996 | | [2910-2927] 3′UTR |
| 386 | CUUUGUAUCAUUCUUGAG | 2962 | CUCAAGAAUGAUACAAAG | 3997 | | [3593-3610] 3′UTR |
| 387 | GGGAGCACUGUGUUUAUG | 2963 | CAUAAACACAGUGCUCCC | 3998 | | [3488-3505] 3′UTR |
| 388 | UGUCUCUGAUGCUUUGUA | 2964 | UACAAAGCAUCAGAGACA | 3999 | | [3582-3599] 3′UTR |
| 389 | GUUCCAGCCUCAGCUGAG | 2965 | CUCAGCUGAGGCUGGAAC | 4000 | | [1652-1669] 3′UTR |
| 390 | GGUUAGGAUAGGAAGAAC | 2966 | GUUCUUCCUAUCCUAACC | 4001 | | [2322-2339] 3′UTR |
| 391 | AUAUACAACUCCACCAGA | 2967 | UCUGGUGGAGUUGUAUAU | 4002 | Rh | [2733-2750] 3′UTR |
| 392 | UCUGAGCCUUGUAGAAAU | 2968 | AUUUCUACAAGGCUCAGA | 4003 | Rh | [1607-1624] 3′UTR |
| 393 | GUGAGGUCCUGUCCUGAG | 2969 | CUCAGGACAGGACCUCAC | 4004 | Rh | [1743-1760] 3′UTR |
| 394 | GGGUGGCAGCUGACAGAG | 2970 | CUCUGUCAGCUGCCACCC | 4005 | | [3200-3217] 3′UTR |
| 395 | CAAGCAGACUGCGCAUGU | 2971 | ACAUGCGCAGUCUGCUUG | 4006 | | [3567-3584] 3′UTR |
| 396 | CUCCCUCUGAGCCUUGUA | 2972 | UACAAGGCUCAGAGGGAG | 4007 | Rh | [1602-1619] 3′UTR |
| 397 | GGAGGUAGGUGGCUUUGG | 2973 | CCAAAGCCACCUACCUCC | 4008 | Rh | [2076-2093] 3′UTR |
| 398 | GAGCAGAAAACAAAACAG | 2974 | CUGUUUUGUUUUCUGCUC | 4009 | | [3169-3186] 3′UTR |
| 399 | AGAAGGCUCUCCAUUUGG | 2975 | CCAAAUGGAGAGCCUUCU | 4010 | | [3270-3287] 3′UTR |
| 400 | UAUGAAGUCUGAGACCUU | 2976 | AAGGUCUCAGACUUCAUA | 4011 | | [3512-3529] 3′UTR |
| 401 | AACAUUUACUCCUGUUUC | 2977 | GAAACAGGAGUAAAUGUU | 4012 | Rh | [2811-2828] 3′UTR |
| 402 | GACGAGUGCCUCUGGAUG | 2978 | CAUCCAGAGGCACUCGUC | 4013 | Rh, Rb, Cw | [809-826] ORF |
| 403 | CUGGGUCACAGAGAAGAA | 2979 | UUCUUCUCUGUGACCCAG | 4014 | Rh | [829-846] ORF |
| 404 | CUAGGAAGGGAAGGAUUU | 2980 | AAAUCCUUCCCUUCCUAG | 4015 | Rh | [2057-2074] 3′UTR |
| 405 | CGGCUUCCCUCCCAGUCC | 2981 | GGACUGGGAGGGAAGCCG | 4016 | | [1236-1253] 3′UTR |
| 406 | CCAGUGGGAGCCUCCCUC | 2982 | GAGGGAGGCUCCCACUGG | 4017 | Rh | [1591-1608] 3′UTR |
| 407 | GAGUUUCUCGACAUCGAG | 2983 | CUCGAUGUCGAGAAACUC | 4018 | Ck, Dg | [938-955] ORF |
| 408 | AGAAGAGCCGGGUGGCAG | 2984 | CUGCCACCCGGCUCUUCU | 4019 | | [3191-3208] 3′UTR |
| 409 | ACAUCAGCUGUAAUCAUU | 2985 | AAUGAUUACAGCUGAUGU | 4020 | | [2865-2882] 3′UTR |
| 410 | CUCAGAUGAUAGGUGAAC | 2986 | GUUCACCUAUCAUCUGAG | 4021 | | [2173-2190] 3′UTR |
| 411 | GCAGGUGGAUUCCUUCAG | 2987 | CUGAAGGAAUCCACCUGC | 4022 | Rh | [2992-3009] 3′UTR |
| 412 | GCGCAUGUCUCUGAUGCU | 2988 | AGCAUCAGAGACAUGCGC | 4023 | | [3577-3594] 3′UTR |
| 413 | CAGUAUAUACAACUCCAC | 2989 | GUGGAGUUGUAUAUACUG | 4024 | Rh | [2729-2746] 3′UTR |
| 414 | CAUUCUUGAGCAAUCGCU | 2990 | AGCGAUUGCUCAAGAAUG | 4025 | | [3601-3618] 3′UTR |
| 415 | CCUCCUCGGCAGUGUGUG | 2991 | CACACACUGCCGAGGAGG | 4026 | | [579-596] ORF |
| 416 | UCCUGUUUCUGCUGAUUG | 2992 | CAAUCAGCAGAAACAGGA | 4027 | | [2820-2837] 3′UTR |
| 417 | CCCUCCUCGGCAGUGUGU | 2993 | ACACACUGCCGAGGAGGG | 4028 | | [578-595] ORF |
| 418 | UACCCUUGGUAGGUAUUA | 2994 | UAAUACCUACCAAGGGUA | 4029 | | [2902-2919] 3′UTR |
| 419 | GCUUCCUGUAUGGUGAUA | 2995 | UAUCACCAUACAGGAAGC | 4030 | | [2785-2802] 3′UTR |
| 420 | GGACAUGGCCCUUGUUUU | 2996 | AAAACAAGGGCCAUGUCC | 4031 | | [1408-1425] 3′UTR |
| 421 | GCAUGAAUAAAACACUCA | 2997 | UGAGUGUUUUAUUCAUGC | 4032 | Rh | [1053-1070] 3′UTR |
| 422 | CCUGUUUCUGCUGAUUGU | 2998 | ACAAUCAGCAGAAACAGG | 4033 | | [2821-2838] 3′UTR |
| 423 | GCACAUCACCCUCUGUGA | 2999 | UCACAGAGGGUGAUGUGC | 4034 | Rh | [667-684] ORF |
| 424 | GCCGCUCAAAUACCUUCA | 3000 | UGAAGGUAUUUGAGCGGC | 4035 | | [3221-3238] 3′UTR |
| 425 | GCAACAGGCGUUUUGCAA | 3001 | UUGCAAAACGCCUGUUGC | 4036 | Cw, Rt, Ms | [403-420] ORF |
| 426 | GGGACGGCAAGAUGCACA | 3002 | UGUGCAUCUUGCCGUCCC | 4037 | | [654-671] ORF |
| 427 | GCCAGGCACUAUGUGUCU | 3003 | AGACACAUAGUGCCUGGC | 4038 | | [1179-1196] 3′UTR |
| 428 | GACACACUCACUUCUUUC | 3004 | GAAAGAAGUGAGUGUGUC | 4039 | | [2095-2112] 3′UTR |
| 429 | CUGAGACCUUCCGGUGCU | 3005 | AGCACCGGAAGGUCUCAG | 4040 | | [3520-3537] 3′UTR |
| 430 | CAGAAGAAGAGCCUGAAC | 3006 | GUUCAGGCUCUUCUUCUG | 4041 | Rh, Rb, Cw, Ms, Pg | [719-736] ORF |
| 431 | GAUAGGUGAACCUGAGUU | 3007 | AACUCAGGUUCACCUAUC | 4042 | | [2180-2197] 3′UTR |
| 432 | GUUCUAUUCAGCGGCAAC | 3008 | GUUGCCGCUGAAUAGAAC | 4043 | | [2503-2520] 3′UTR |
| 433 | AGACUGGGAGGGUAUCCA | 3009 | UGGAUACCCUCCCAGUCU | 4044 | Rh | [2623-2640] 3′UTR |
| 434 | GGCCAACUGCAAAAAAAG | 3010 | CUUUUUUUGCAGUUGGCC | 4045 | | [986-1003] 3′UTR |
| 435 | UGGCCUUUAUAUUUGAUC | 3011 | GAUCAAAUAUAAAGGCCA | 4046 | | [3124-3141] 3′UTR |
| 436 | GCUGGGAACACACAAGAG | 3012 | CUCUUGUGUGUUCCCAGC | 4047 | | [3535-3552] 3′UTR |
| 437 | GUGGAAGCAUUUGACCCA | 3013 | UGGGUCAAAUGCUUCCAC | 4048 | | [2954-2971] 3′UTR |
| 438 | CCAUGAUCCCGUGCUACA | 3014 | UGUAGCACGGGAUCAUGG | 4049 | Rh, Rb | [780-797] ORF |
| 439 | CAGGCAGCACUUAGGGAU | 3015 | AUCCCUAAGUGCUGCCUG | 4050 | Rh | [1282-1299] 3′UTR |
| 440 | GCAAAGUAAAGGAUCUUU | 3016 | AAAGAUCCUUUACUUUGC | 4051 | | [3083-3100] 3′UTR |
| 441 | GUGGACAAUAAACAGUAU | 3017 | AUACUGUUUAUUGUCCAC | 4052 | | [3625-3642] 3′UTR |
| 442 | UGCAAAAAAAGCCUCCAA | 3018 | UUGGAGGCUUUUUUUGCA | 4053 | | [993-1010] 3′UTR |
| 443 | CAAGCAGGAGUUUCUCGA | 3019 | UCGAGAAACUCCUGCUUG | 4054 | Ck, Dg | [931-948] ORF |
| 444 | CGUUCCAGCCUCAGCUGA | 3020 | UCAGCUGAGGCUGGAACG | 4055 | | [1651-1668] 3′UTR |
| 445 | CGGUCCGUGGACAAUAAA | 3021 | UUUAUUGUCCACGGACCG | 4056 | | [3619-3636] 3′UTR |
| 446 | UAGGAUAGGAAGAACUUU | 3022 | AAAGUUCUUCCUAUCCUA | 4057 | | [2325-2342] 3′UTR |
| 447 | AGCUGAGUCUUUUUGGUC | 3023 | GACCAAAAAGACUCAGCU | 4058 | Rh | [1663-1680] 3′UTR |
| 448 | UGGCUUUGGUGACACACU | 3024 | AGUGUGUCACCAAAGCCA | 4059 | | [2085-2102] 3′UTR |
| 449 | GCCGGUGGCUGCCCUCAA | 3025 | UUGAGGGCAGCCACCGGC | 4060 | Rh | [1774-1791] 3′UTR |
| 450 | CCUGGAACCAGUGGCUAG | 3026 | CUAGCCACUGGUUCCAGG | 4061 | | [1532-1549] 3′UTR |
| 451 | GCCUGUUCUGGCAUCAGG | 3027 | CCUGAUGCCAGAACAGGC | 4062 | | [1830-1847] 3′UTR |
| 452 | GACAGAAAAAGCUGGGUC | 3028 | GACCCAGCUUUUUCUGUC | 4063 | Rh | [1930-1947] 3′UTR |
| 453 | CAGCCUCCAGGACACUAU | 3029 | AUAGUGUCCUGGAGGCUG | 4064 | | [2114-2131] 3′UTR |
| 454 | GAAGCAUUUGACCCAGAG | 3030 | CUCUGGGUCAAAUGCUUC | 4065 | | [2957-2974] 3′UTR |
| 455 | GGCAUCAGGCACCUGGAU | 3031 | AUCCAGGUGCCUGAUGCC | 4066 | | [1839-1856] 3′UTR |
| 456 | AGGAUAGGAAGAACUUUC | 3032 | GAAAGUUCUUCCUAUCCU | 4067 | | [2326-2343] 3′UTR |
| 457 | AGUGCAAGAUCACGCGCU | 3033 | AGCGCGUGAUCUUGCACU | 4068 | Dg, Pg | [759-776] ORF |
| 458 | CUUCGAUCCUUGGGUGCA | 3034 | UGCACCCAAGGAUCGAAG | 4069 | Rh | [1201-1218] 3′UTR |
| 459 | GUAAAGGAUCUUUGAGUA | 3035 | UACUCAAAGAUCCUUUAC | 4070 | | [3088-3105] 3′UTR |
| 460 | CAGGCACCUGGAUUGAGU | 3036 | ACUCAAUCCAGGUGCCUG | 4071 | Rh | [1844-1861] 3′UTR |
| 461 | AUAAGGAGAAUCUCUUGU | 3037 | ACAAGAGAUUCUCCUUAU | 4072 | | [2353-2370] 3′UTR |
| 462 | UUCCCUCCCUCAAAGACU | 3038 | AGUCUUUGAGGGAGGGAA | 4073 | | [1973-1990] 3′UTR |
| 463 | UCUGGAAACGACAUUUAU | 3039 | AUAAAUGUCGUUUCCAGA | 4074 | | [470-487] ORF |
| 464 | GUAAGAAGUCCAGCCUAG | 3040 | CUAGGCUGGACUUCUUAC | 4075 | Rh | [2043-2060] 3′UTR |
| 465 | CAAAACAGGUUAAGAAGA | 3041 | UCUUCUUAACCUGUUUUG | 4076 | | [3179-3196] 3′UTR |
| 466 | GGUUGCCAUUGCUUCUUG | 3042 | CAAGAAGCAAUGGCAACC | 4077 | Rh | [1813-1830] 3′UTR |
| 467 | AGGUCCUCAUCCCAUCCU | 3043 | AGGAUGGGAUGAGGACCU | 4078 | Rh | [1155-1172] 3′UTR |
| 468 | GUCCGUGGACAAUAAACA | 3044 | UGUUUAUUGUCCACGGAC | 4079 | | [3621-3638] 3′UTR |
| 469 | UGUGUUUAUGCUGGAAUA | 3045 | UAUUCCAGCAUAAACACA | 4080 | | [3496-3513] 3′UTR |
| 470 | GGGCGUUUUCAUGCUGUA | 3046 | UACAGCAUGAAAACGCCC | 4081 | Rh | [2661-2678] 3′UTR |
| 471 | GGCACCUGGAUUGAGUUG | 3047 | CAACUCAAUCCAGGUGCC | 4082 | | [1846-1863] 3′UTR |
| 472 | CUGUAAUCAUUCCUGUGC | 3048 | GCACAGGAAUGAUUACAG | 4083 | Rh | [2872-2889] 3′UTR |
| 473 | GGCCUGGAAAUGUGCAUU | 3049 | AAUGCACAUUUCCAGGCC | 4084 | Rh | [1321-1338] 3′UTR |
| 474 | GGGUCGUUGCAAGACUGU | 3050 | ACAGUCUUGCAACGACCC | 4085 | | [1355-1372] 3′UTR |
| 475 | CAGGCGUUUUGCAAUGCA | 3051 | UGCAUUGCAAAACGCCUG | 4086 | Cw, Rt, Ms | [407-424] ORF |
| 476 | AGGGUAUCCAGGAAUCGG | 3052 | CCGAUUCCUGGAUACCCU | 4087 | | [2631-2648] 3′UTR |
| 477 | CUGGAAAUGUGCAUUUUG | 3053 | CAAAAUGCACAUUUCCAG | 4088 | Rh | [1324-1341] 3′UTR |
| 478 | GGUGGCUGCCCUCAAGGU | 3054 | ACCUUGAGGGCAGCCACC | 4089 | Rh | [1777-1794] 3′UTR |
| 479 | GGUCCAGCUCUGACAUCC | 3055 | GGAUGUCAGAGCUGGACC | 4090 | Rh | [1022-1039] 3′UTR |
| 480 | GCGGCCUGGGCGUGGUCU | 3056 | AGACCACGCCCAGGCCGC | 4091 | | [2455-2472] 3′UTR |
| 481 | UGCAUUUUGCAGAAACUU | 3057 | AAGUUUCUGCAAAAUGCA | 4092 | Rh | [1333-1350] 3′UTR |
| 482 | GUCUUUUAACCGUGCUGA | 3058 | UCAGCACGGUUAAAAGAC | 4093 | | [3153-3170] 3′UTR |
| 483 | CUCAAGGUCCCUUCCCUA | 3059 | UAGGGAAGGGACCUUGAG | 4094 | | [1787-1804] 3′UTR |
| 484 | AUCCAGUAUGAGAUCAAG | 3060 | CUUGAUCUCAUACUGGAU | 4095 | Rh, Rb | [506-523] ORF |
| 485 | GUCUGAAAGGUGUGGCCU | 3061 | AGGCCACACCUUUCAGAC | 4096 | | [3112-3129] 3′UTR |
| 486 | GACGUUGGAGGAAAGAAG | 3062 | CUUCUUUCCUCCAACGUC | 4097 | Rt, Ms | [608-625] ORF |
| 487 | CUUGUUUCCUCCCACCUG | 3063 | CAGGUGGGAGGAAACAAG | 4098 | | [2366-2383] 3′UTR |
| 488 | GACCUGGUCAGCACAGAU | 3064 | AUCUGUGCUGACCAGGUC | 4099 | Rh | [2581-2598] 3′UTR |
| 489 | GUUGCAGAUAUACCAACU | 3065 | AGUUGGUAUAUCUGCAAC | 4100 | Rh | [2195-2212] 3′UTR |
| 490 | CCACACACGUUGGUCUUU | 3066 | AAAGACCAACGUGUGUGG | 4101 | | [3141-3158] 3′UTR |
| 491 | CCCUCUGUGACUUCAUCG | 3067 | CGAUGAAGUCACAGAGGG | 4102 | Rh, Cw | [675-692] ORF |
| 492 | GAUCCUUGGGUGCAGGCA | 3068 | UGCCUGCACCCAAGGAUC | 4103 | Rh | [1205-1222] 3′UTR |
| 493 | CAAUGAAACCGAAGCUUG | 3069 | CAAGCUUCGGUUUCAUUG | 4104 | | [2437-2454] 3′UTR |
| 494 | AGCCUUGUAGAAAUGGGA | 3070 | UCCCAUUUCUACAAGGCU | 4105 | Rh | [1611-1628] 3′UTR |
| 495 | CUGUUCGCUUCCUGUAUG | 3071 | CAUACAGGAAGCGAACAG | 4106 | | [2779-2796] 3′UTR |
| 496 | AUGUGUUCCCUCAGUGUG | 3072 | CACACUGAGGGAACACAU | 4107 | | [2280-2297] 3′UTR |
| 497 | CCAAGCAGGCAGCACUUA | 3073 | UAAGUGCUGCCUGCUUGG | 4108 | | [1277-1294] 3′UTR |
| 498 | GCGAGUGCAAGAUCACGC | 3074 | GCGUGAUCUUGCACUCGC | 4109 | | [756-773] ORF |
| 499 | AUAGUUUAAGAAGGCUCU | 3075 | AGAGCCUUCUUAAACUAU | 4110 | | [3262-3279] 3′UTR |
| 500 | CAGACUGCGCAUGUCUCU | 3076 | AGAGACAUGCGCAGUCUG | 4111 | | [3571-3588] 3′UTR |
| 501 | CCUGUUUUAAGAGACAUC | 3077 | GAUGUCUCUUAAAACAGG | 4112 | Rh | [2134-2151] 3′UTR |
| 502 | UCAGUAUAUACAACUCCA | 3078 | UGGAGUUGUAUAUACUGA | 4113 | Rh | [2728-2745] 3′UTR |
| 503 | CGGCAAGAUGCACAUCAC | 3079 | GUGAUGUGCAUCUUGCCG | 4114 | Rh, Ck, Dg, Pg | [658-675] ORF |
| 504 | CAUCAGCUGUAAUCAUUC | 3080 | GAAUGAUUACAGCUGAUG | 4115 | | [2866-2883] 3′UTR |
| 505 | GCACCUGUUAAGACUCCU | 3081 | AGGAGUCUUAACAGGUGC | 4116 | Rh | [2527-2544] 3′UTR |
| 506 | GUCUGAGACCUUCCGGUG | 3082 | CACCGGAAGGUCUCAGAC | 4117 | | [3518-3535] 3′UTR |
| 507 | CUUCUUUCUCAGCCUCCA | 3083 | UGGAGGCUGAGAAAGAAG | 4118 | | [2105-2122] 3′UTR |
| 508 | GAUAAGGAGAAUCUCUUG | 3084 | CAAGAGAUUCUCCUUAUC | 4119 | | [2352-2369] 3′UTR |
| 509 | AGAUAUACCAACUUCUGC | 3085 | GCAGAAGUUGGUAUAUCU | 4120 | Rh | [2200-2217] 3′UTR |
| 510 | CUAUGCAGGUGGAUUCCU | 3086 | AGGAAUCCACCUGCAUAG | 4121 | Rh | [2988-3005] 3′UTR |
| 511 | AGGAAGCCGCUCAAAUAC | 3087 | GUAUUUGAGCGGCUUCCU | 4122 | | [3216-3233] 3′UTR |
| 512 | CGUGCUACAUCUCCUCCC | 3088 | GGGAGGAGAUGUAGCACG | 4123 | Rh | [789-806] ORF |
| 513 | AAAAAAGGUUUCUGCAUC | 3089 | GAUGCAGAAACCUUUUUU | 4124 | | [2936-2953] 3′UTR |
| 514 | GGACACGCGGCUUCCCUC | 3090 | GAGGGAAGCCGCGUGUCC | 4125 | | [1229-1246] 3′UTR |
| 515 | UAGAGUUUAUCUACACGG | 3091 | CCGUGUAGAUAAACUCUA | 4126 | Dg, Pg | [558-575] ORF |
| 516 | UCAAAGACUGACAGCCAU | 3092 | AUGGCUGUCAGUCUUUGA | 4127 | Rh | [1982-1999] 3′UTR |
| 517 | UGACAUCAGCUGUAAUCA | 3093 | UGAUUACAGCUGAUGUCA | 4128 | | [2863-2880] 3′UTR |
| 518 | AGUUGCACAGCUUUGCUU | 3094 | AAGCAAAGCUGUGCAACU | 4129 | | [1859-1876] 3′UTR |
| 519 | AGUGGCUAGUUCUUGAAG | 3095 | CUUCAAGAACUAGCCACU | 4130 | | [1541-1558] 3′UTR |
| 520 | UGGCAACCCUAUCAAGAG | 3096 | CUCUUGAUAGGGUUGCCA | 4131 | | [487-504] ORF |
| 521 | GUGGCUGCCCUCAAGGUC | 3097 | GACCUUGAGGGCAGCCAC | 4132 | Rh | [1778-1795] 3′UTR |
| 522 | GCGUUUUGCAAUGCAGAU | 3098 | AUCUGCAUUGCAAAACGC | 4133 | | [410-427] ORF |
| 523 | GAUCAAGCAGAUAAAGAU | 3099 | AUCUUUAUCUGCUUGAUC | 4134 | Cw, Dg, Rt, Ms, Pg | [517-534] ORF |
| 524 | GCAGGCAGCACUUAGGGA | 3100 | UCCCUAAGUGCUGCCUGC | 4135 | Rh | [1281-1298] 3′UTR |
| 525 | CUCCAACCCAUAUAACAC | 3101 | GUGUUAUAUGGGUUGGAG | 4136 | | [2754-2771] 3′UTR |
| 526 | GAACUAGGGAACCUAUGU | 3102 | ACAUAGGUUCCCUAGUUC | 4137 | Rh | [2266-2283] 3′UTR |
| 527 | GACGAUAUACAGGCACAU | 3103 | AUGUGCCUGUAUAUCGUC | 4138 | | [2401-2418] 3′UTR |
| 528 | GAAAUAUUGGACUUGCUG | 3104 | CAGCAAGUCCAAUAUUUC | 4139 | | [3419-3436] 3′UTR |
| 529 | GAAGCCGCUCAAAUACCU | 3105 | AGGUAUUUGAGCGGCUUC | 4140 | | [3218-3235] 3′UTR |
| 530 | GGCAGCCUGGAACCAGUG | 3106 | CACUGGUUCCAGGCUGCC | 4141 | | [1527-1544] 3′UTR |
| 531 | GUCUGGAGGGAGACGUGG | 3107 | CCACGUCUCCCUCCAGAC | 4142 | | [1132-1149] 3′UTR |
| 532 | CAUAGUAAGAAGUCCAGC | 3108 | GCUGGACUUCUUACUAUG | 4143 | | [2039-2056] 3′UTR |
| 533 | CUCCUGUUUCUGCUGAUU | 3109 | AAUCAGCAGAAACAGGAG | 4144 | | [2819-2836] 3′UTR |
| 534 | CAGAAUUCCAGUGGGAGC | 3110 | GCUCCCACUGGAAUUCUG | 4145 | Rh | [1584-1601] 3′UTR |
| 535 | AGCACUGUGUUUAUGCUG | 3111 | CAGCAUAAACACAGUGCU | 4146 | | [3491-3508] 3′UTR |
| 536 | GUAACAUUUACUCCUGUU | 3112 | AACAGGAGUAAAUGUUAC | 4147 | Rh | [2809-2826] 3′UTR |
| 537 | UGAGCUGCGUUCCAGCCU | 3113 | AGGCUGGAACGCAGCUCA | 4148 | | [1644-1661] 3′UTR |
| 538 | AGGUGGAUUCCUUCAGGU | 3114 | ACCUGAAGGAAUCCACCU | 4149 | Rh | [2994-3011] 3′UTR |
| 539 | UUUGUUUCCGUUUGGAUU | 3115 | AAUCCAAACGGAAACAAA | 4150 | | [3460-3477] 3′UTR |
| 540 | AAAGGAUCUUUGAGUAGG | 3116 | CCUACUCAAAGAUCCUUU | 4151 | | [3090-3107] 3′UTR |
| 541 | GGUCUGGAGGGAGACGUG | 3117 | CACGUCUCCCUCCAGACC | 4152 | | [1131-1148] 3′UTR |
| 542 | UGAGAUCAAGCAGAUAAA | 3118 | UUUAUCUGCUUGAUCUCA | 4153 | Rh, Cw, Dg, Rt, Ms | [514-531] ORF |
| 543 | GGAGGGUAUCCAGGAAUC | 3119 | GAUUCCUGGAUACCCUCC | 4154 | | [2629-2646] 3′UTR |
| 544 | GAGUUGCACAGCUUUGCU | 3120 | AGCAAAGCUGUGCAACUC | 4155 | | [1858-1875] 3′UTR |
| 545 | CCUUCACAAUAAAUAGUG | 3121 | CACUAUUUAUUGUGAAGG | 4156 | | [3233-3250] 3′UTR |
| 546 | CUUGUUUUCUGCAGCUUC | 3122 | GAAGCUGCAGAAAACAAG | 4157 | Rh | [1418-1435] 3′UTR |
| 547 | AUUGAGUUGCACAGCUUU | 3123 | AAAGCUGUGCAACUCAAU | 4158 | | [1855-1872] 3′UTR |
| 548 | UGAUUUUGUUUCCGUUUG | 3124 | CAAACGGAAACAAAAUCA | 4159 | | [3456-3473] 3′UTR |
| 549 | CAGCUCUCUUCUCCUAUU | 3125 | AAUAGGAGAAGAGAGCUG | 4160 | | [3320-3337] 3′UTR |
| 550 | GGCCUACCAGGUCCCUUU | 3126 | AAAGGGACCUGGUAGGCC | 4161 | Rh | [1379-1396] 3′UTR |
| 551 | UGUUAUGUUCUAAGCACA | 3127 | UGUGCUUAGAACAUAACA | 4162 | | [3304-3321] 3′UTR |
| 552 | GAGCCGGGUGGCAGCUGA | 3128 | UCAGCUGCCACCCGGCUC | 4163 | | [3195-3212] 3′UTR |
| 553 | GGAGGAAUCGGUGAGGUC | 3129 | GACCUCACCGAUUCCUCC | 4164 | | [1733-1750] 3′UTR |
| 554 | CCUGGGACACCCUGAGCA | 3130 | UGCUCAGGGUGUCCCAGG | 4165 | Rh, Dg, Pg | [696-713] ORF |
| 555 | UGUGCAUUUUGCAGAAAC | 3131 | GUUUCUGCAAAAUGCACA | 4166 | Rh, Rt, Ms | [1331-1348] 3′UTR |
| 556 | CCCUCUGCCAGGCACUAU | 3132 | AUAGUGCCUGGCAGAGGG | 4167 | | [1173-1190] 3′UTR |
| 557 | AGUCUGAGACCUUCCGGU | 3133 | ACCGGAAGGUCUCAGACU | 4168 | | [3517-3534] 3′UTR |
| 558 | CAACUUCUGCUUGUAUUU | 3134 | AAAUACAAGCAGAAGUUG | 4169 | Rh | [2208-2225] 3′UTR |
| 559 | CAGCCUGGAACCAGUGGC | 3135 | GCCACUGGUUCCAGGCUG | 4170 | | [1529-1546] 3′UTR |
| 560 | GCUUUGGUGACACACUCA | 3136 | UGAGUGUGUCACCAAAGC | 4171 | | [2087-2104] 3′UTR |
| 561 | CGCCUGCAUCAAGAGAAG | 3137 | CUUCUCUUGAUGCAGGCG | 4172 | Rh, Cw, Dg, Rt, Ms | [874-891] ORF |
| 562 | CUCCAAGGGUUUCGACUG | 3138 | CAGUCGAAACCCUUGGAG | 4173 | Rh | [1005-1022] 3′UTR |
| 563 | UGCUGGGAACACACAAGA | 3139 | UCUUGUGUGUUCCCAGCA | 4174 | | [3534-3551] 3′UTR |
| 564 | ACAUUUACUCCUGUUUCU | 3140 | AGAAACAGGAGUAAAUGU | 4175 | Rh | [2812-2829] 3′UTR |
| 565 | GGUUUCGACUGGUCCAGC | 3141 | GCUGGACCAGUCGAAACC | 4176 | Rh | [1012-1029] 3′UTR |
| 566 | CAGCUGUAAUCAUUCCUG | 3142 | CAGGAAUGAUUACAGCUG | 4177 | | [2869-2886] 3′UTR |
| 567 | CCAUCUGCACAUCCUGAG | 3143 | CUCAGGAUGUGCAGAUGG | 4178 | Rh | [1912-1929] 3′UTR |
| 568 | CAUCCCAUGGGUCCAAAU | 3144 | AUUUGGACCCAUGGGAUG | 4179 | | [1069-1086] 3′UTR |
| 569 | CUGUUUCUGCUGAUUGUU | 3145 | AACAAUCAGCAGAAACAG | 4180 | | [2822-2839] 3′UTR |
| 570 | GUGGCUUUGGUGACACAC | 3146 | GUGUGUCACCAAAGCCAC | 4181 | | [2084-2101] 3′UTR |
| 571 | GGCAGCUGACAGAGGAAG | 3147 | CUUCCUCUGUCAGCUGCC | 4182 | | [3204-3221] 3′UTR |
| 572 | AGAUCUUGAUGACUUCCC | 3148 | GGGAAGUCAUCAAGAUCU | 4183 | Rh | [2595-2612] 3′UTR |
| 573 | UGCAAGACUGUGUAGCAG | 3149 | CUGCUACACAGUCUUGCA | 4184 | Rh | [1362-1379] 3′UTR |
| 574 | CAGAUGUAGUGAUCAGGG | 3150 | CCCUGAUCACUACAUCUG | 4185 | | [423-440] ORF |
| 575 | CAUUUGGCAUCGUUUAAU | 3151 | AUUAAACGAUGCCAAAUG | 4186 | | [3281-3298] 3′UTR |
| 576 | CAGAAAAAGCUGGGUCUU | 3152 | AAGACCCAGCUUUUUCUG | 4187 | Rh | [1932-1949] 3′UTR |
| 577 | CCCAGAGUGGAACGCGUG | 3153 | CACGCGUUCCACUCUGGG | 4188 | | [2968-2985] 3′UTR |
| 578 | ACCUGUUAAGACUCCUGA | 3154 | UCAGGAGUCUUAACAGGU | 4189 | Rh | [2529-2546] 3′UTR |
| 579 | CAUCACCCUCUGUGACUU | 3155 | AAGUCACAGAGGGUGAUG | 4190 | Rh, Cw | [670-687] ORF |
| 580 | GGCUUCGAUCCUUGGGUG | 3156 | CACCCAAGGAUCGAAGCC | 4191 | Rh | [1199-1216] 3′UTR |
| 581 | CCUUGGCACCGUCACAGA | 3157 | UCUGUGACGGUGCCAAGG | 4192 | Rh | [1257-1274] 3′UTR |
| 582 | CAAGAGAAGUGACGGCUC | 3158 | GAGCCGUCACUUCUCUUG | 4193 | | [883-900] ORF |
| 583 | AGCUCUCUUCUCCUAUUU | 3159 | AAAUAGGAGAAGAGAGCU | 4194 | | [3321-3338] 3′UTR |
| 584 | GCAGCCUGGAACCAGUGG | 3160 | CCACUGGUUCCAGGCUGC | 4195 | | [1528-1545] 3′UTR |
| 585 | UGGACUCUGGAAACGACA | 3161 | UGUCGUUUCCAGAGUCCA | 4196 | Rh | [465-482] ORF |
| 586 | CACUCACUUCUUUCUCAG | 3162 | CUGAGAAAGAAGUGAGUG | 4197 | | [2099-2116] 3′UTR |
| 587 | ACCGUGCUGAGCAGAAAA | 3163 | UUUUCUGCUCAGCACGGU | 4198 | | [3161-3178] 3′UTR |
| 588 | AGAAUCUCUUGUUUCCUC | 3164 | GAGGAAACAAGAGAUUCU | 4199 | | [2359-2376] 3′UTR |
| 589 | ACAGCUCUCUUCUCCUAU | 3165 | AUAGGAGAAGAGAGCUGU | 4200 | | [3319-3336] 3′UTR |
| 590 | UCCUCAGAAUUCCAGUGG | 3166 | CCACUGGAAUUCUGAGGA | 4201 | Rh | [1580-1597] 3′UTR |
| 591 | GGCCCUUGUUUUCUGCAG | 3167 | CUGCAGAAAACAAGGGCC | 4202 | Rh | [1414-1431] 3′UTR |
| 592 | GUGGGUCUGGAGGGAGAC | 3168 | GUCUCCCUCCAGACCCAC | 4203 | Rh | [1128-1145] 3′UTR |
| 593 | AUCUCUUGUUUCCUCCCA | 3169 | UGGGAGGAAACAAGAGAU | 4204 | | [2362-2379] 3′UTR |
| 594 | GAACCACAGGUACCAGAU | 3170 | AUCUGGUACCUGUGGUUC | 4205 | Rh, Rb, Cw, Rt, Ms, Pg | [733-750] ORF |
| 595 | GCCUCCAAGGGUUUCGAC | 3171 | GUCGAAACCCUUGGAGGC | 4206 | Rh | [1003-1020] 3′UTR |
| 596 | CAGCAUGAAUAAAACACU | 3172 | AGUGUUUUAUUCAUGCUG | 4207 | Rh | [1051-1068] 3′UTR |
| 597 | CACCCAGAAGAAGAGCCU | 3173 | AGGCUCUUCUUCUGGGUG | 4208 | Rh, Ck, Cw, Rt, Ms, Pg | [715-732] ORF |
| 598 | UCAUAAUGGACCAGUCCA | 3174 | UGGACUGGUCCAUUAUGA | 4209 | Rh | [2703-2720] 3′UTR |
| 599 | ACAUCACCCUCUGUGACU | 3175 | AGUCACAGAGGGUGAUGU | 4210 | Rh | [669-686] ORF |
| 600 | CCUUCCUGGAAACAGCAU | 3176 | AUGCUGUUUCCAGGAAGG | 4211 | Rh, Rb, Rt, Ms | [1039-1056] 3′UTR |
| 601 | AGCCUCCAAGGGUUUCGA | 3177 | UCGAAACCCUUGGAGGCU | 4212 | Rh | [1002-1019] 3′UTR |
| 602 | UGACACACUCACUUCUUU | 3178 | AAAGAAGUGAGUGUGUCA | 4213 | | [2094-2111] 3′UTR |
| 603 | UGUGGGUCUGGAGGGAGA | 3179 | UCUCCCUCCAGACCCACA | 4214 | Rh | [1127-1144] 3′UTR |
| 604 | AGGCUCUCCAUUUGGCAU | 3180 | AUGCCAAAUGGAGAGCCU | 4215 | | [3273-3290] 3′UTR |
| 605 | CCAGUCCAUGUGAUUUCA | 3181 | UGAAAUCACAUGGACUGG | 4216 | Rh | [2713-2730] 3′UTR |
| 606 | GACGUGGGUCCAAGGUCC | 3182 | GGACCUUGGACCCACGUC | 4217 | | [1143-1160] 3′UTR |
| 607 | GGACAGAAAAAGCUGGGU | 3183 | ACCCAGCUUUUUCUGUCC | 4218 | Rh | [1929-1946] 3′UTR |
| 608 | CUACCAGGUCCCUUUCAU | 3184 | AUGAAAGGGACCUGGUAG | 4219 | Rh | [1382-1399] 3′UTR |
| 609 | AAUCCUCAGAAUUCCAGU | 3185 | ACUGGAAUUCUGAGGAUU | 4220 | Rh | [1578-1595] 3′UTR |
| 610 | CUUUGAGUAGGUUCGGUC | 3186 | GACCGAACCUACUCAAAG | 4221 | | [3097-3114] 3′UTR |
| 611 | GCCGGGUGGCAGCUGACA | 3187 | UGUCAGCUGCCACCCGGC | 4222 | | [3197-3214] 3′UTR |
| 612 | GCAGAAACUUUUGAGGGU | 3188 | ACCCUCAAAAGUUUCUGC | 4223 | Rh | [1341-1358] 3′UTR |
| 613 | CAGUGGCUAGUUCUUGAA | 3189 | UUCAAGAACUAGCCACUG | 4224 | | [1540-1557] 3′UTR |
| 614 | GAAAUGGGAGCGAGAAAC | 3190 | GUUUCUCGCUCCCAUUUC | 4225 | | [1620-1637] 3′UTR |
| 615 | GCAGACUGCGCAUGUCUC | 3191 | GAGACAUGCGCAGUCUGC | 4226 | | [3570-3587] 3′UTR |
| 616 | UGUAAUCAUUCCUGUGCU | 3192 | AGCACAGGAAUGAUUACA | 4227 | Rh | [2873-2890] 3′UTR |
| 617 | UGGUAGGUAUUAGACUUG | 3193 | CAAGUCUAAUACCUACCA | 4228 | | [2908-2925] 3′UTR |
| 618 | CAUUUACUCCUGUUUCUG | 3194 | CAGAAACAGGAGUAAAUG | 4229 | Rh | [2813-2830] 3′UTR |
| 619 | AUGAAGUCUGAGACCUUC | 3195 | GAAGGUCUCAGACUUCAU | 4230 | | [3513-3530] 3′UTR |
| 620 | CUUGAUGACUUCCCUUUC | 3196 | GAAAGGGAAGUCAUCAAG | 4231 | Rh | [2599-2616] 3′UTR |
| 621 | CAACAGGCGUUUUGCAAU | 3197 | AUUGCAAAACGCCUGUUG | 4232 | Cw, Rt, Ms | [404-421] ORF |
| 622 | CCAUAAGCAGGCCUCCAA | 3198 | UUGGAGGCCUGCUUAUGG | 4233 | | [959-976] |
| | | | | | | ORF + 3′UTR |
| 623 | GUACAGUGACCUAAAGUU | 3199 | AACUUUAGGUCACUGUAC | 4234 | | [2676-2693] 3′UTR |
| 624 | GCAUAGUAAGAAGUCCAG | 3200 | CUGGACUUCUUACUAUGC | 4235 | | [2038-2055] 3′UTR |
| 625 | ACACUCACUUCUUUCUCA | 3201 | UGAGAAAGAAGUGAGUGU | 4236 | | [2098-2115] 3′UTR |
| 626 | AUCAAGAGGAUCCAGUAU | 3202 | AUACUGGAUCCUCUUGAU | 4237 | Rh, Rb | [497-514] ORF |
| 627 | AGUGAGAAGGAAGUGGAC | 3203 | GUCCACUUCCUUCUCACU | 4238 | | [452-469] ORF |
| 628 | GCCUAUGCAGGUGGAUUC | 3204 | GAAUCCACCUGCAUAGGC | 4239 | Rh | [2986-3003] 3′UTR |
| 629 | CACCGUCACAGAUGCCAA | 3205 | UUGGCAUCUGUGACGGUG | 4240 | | [1263-1280] 3′UTR |
| 630 | CUUUCUAGGGCAGACUGG | 3206 | CCAGUCUGCCCUAGAAAG | 4241 | Rh | [2612-2629] 3′UTR |
| 631 | CCCUCCCUCAAAGACUGA | 3207 | UCAGUCUUUGAGGGAGGG | 4242 | | [1975-1992] 3′UTR |
| 632 | CUAAGCAUAGUAAGAAGU | 3208 | ACUUCUUACUAUGCUUAG | 4243 | | [2034-2051] 3′UTR |
| 633 | CAGAUAUACCAACUUCUG | 3209 | CAGAAGUUGGUAUAUCUG | 4244 | Rh | [2199-2216] 3′UTR |
| 634 | UUGCAGAUAUACCAACUU | 3210 | AAGUUGGUAUAUCUGCAA | 4245 | Rh | [2196-2213] 3′UTR |
| 635 | GCCUCCCUCUGAGCCUUG | 3211 | CAAGGCUCAGAGGGAGGC | 4246 | Rh | [1600-1617] 3′UTR |
| 636 | GGAAAUGUGCAUUUUGCA | 3212 | UGCAAAAUGCACAUUUCC | 4247 | Rh | [1326-1343] 3′UTR |
| 637 | CUCCCAGGCUUAGUGUUC | 3213 | GAACACUAAGCCUGGGAG | 4248 | | [1958-1975] 3′UTR |
| 638 | CUUUGGUGACACACUCAC | 3214 | GUGAGUGUGUCACCAAAG | 4249 | | [2088-2105] 3′UTR |
| 639 | CAUCAAGAGAAGUGACGG | 3215 | CCGUCACUUCUCUUGAUG | 4250 | | [880-897] ORF |
| 640 | CAGCCAUCGUUCUGCACG | 3216 | CGUGCAGAACGAUGGCUG | 4251 | Rh | [1993-2010] 3′UTR |
| 641 | CAAAGACUGACAGCCAUC | 3217 | GAUGGCUGUCAGUCUUUG | 4252 | Rh | [1983-2000] 3′UTR |
| 642 | AGCAGAAAACAAAACAGG | 3218 | CCUGUUUUGUUUUCUGCU | 4253 | | [3170-3187] 3′UTR |
| 643 | GCACUUAGGGAUCUCCCA | 3219 | UGGGAGAUCCCUAAGUGC | 4254 | Rh | [1288-1305] 3′UTR |
| 644 | UGGACCAGUCCAUGUGAU | 3220 | AUCACAUGGACUGGUCCA | 4255 | Rh | [2709-2726] 3′UTR |
| 645 | AUGUGCAUUUUGCAGAAA | 3221 | UUUCUGCAAAAUGCACAU | 4256 | Rh, Ms | [1330-1347] 3′UTR |
| 646 | UGUAACAUUUACUCCUGU | 3222 | ACAGGAGUAAAUGUUACA | 4257 | Rh | [2808-2825] 3′UTR |
| 647 | GCUGUAAUCAUUCCUGUG | 3223 | CACAGGAAUGAUUACAGC | 4258 | Rh | [2871-2888] 3′UTR |
| 648 | UAAGGAGAAUCUCUUGUU | 3224 | AACAAGAGAUUCUCCUUA | 4259 | | [2354-2371] 3′UTR |
| 649 | UGACAAGCAGACUGCGCA | 3225 | UGCGCAGUCUGCUUGUCA | 4260 | | [3564-3581] 3′UTR |
| 650 | UCCUGUAUGGUGAUAUCA | 3226 | UGAUAUCACCAUACAGGA | 4261 | | [2788-2805] 3′UTR |
| 651 | GAUAGGAAGAACUUUCUC | 3227 | GAGAAAGUUCUUCCUAUC | 4262 | Rh | [2328-2345] 3′UTR |
| 652 | CAUUCCUGUGCUGUGUUU | 3228 | AAACACAGCACAGGAAUG | 4263 | Rh | [2879-2896] 3′UTR |
| 653 | CAAGGUCCCUUCCCUAGC | 3229 | GCUAGGGAAGGGACCUUG | 4264 | | [1789-1806] 3′UTR |
| 654 | CCGUCUUUGGUUCUCCAG | 3230 | CUGGAGAACCAAAGACGG | 4265 | | [3054-3071] 3′UTR |
| 655 | GCUUCUUGCCUGUUCUGG | 3231 | CCAGAACAGGCAAGAAGC | 4266 | | [1823-1840] 3′UTR |
| 656 | UGGGCUGCGAGUGCAAGA | 3232 | UCUUGCACUCGCAGCCCA | 4267 | Ck, Rb, Rt | [750-767] ORF |
| 657 | GAUGGGCUGCGAGUGCAA | 3233 | UUGCACUCGCAGCCCAUC | 4268 | Ck, Rb, Rt | [748-765] ORF |
| 658 | CUGUUCUGGCAUCAGGCA | 3234 | UGCCUGAUGCCAGAACAG | 4269 | | [1832-1849] 3′UTR |
| 659 | GGGUAUCCAGGAAUCGGC | 3235 | GCCGAUUCCUGGAUACCC | 4270 | | [2632-2649] 3′UTR |
| 660 | GCAACCCUAUCAAGAGGA | 3236 | UCCUCUUGAUAGGGUUGC | 4271 | | [489-506] ORF |
| 661 | CCCAUCUGCACAUCCUGA | 3237 | UCAGGAUGUGCAGAUGGG | 4272 | Rh | [1911-1928] 3′UTR |
| 662 | UAUAGUUUAAGAAGGCUC | 3238 | GAGCCUUCUUAAACUAUA | 4273 | | [3261-3278] 3′UTR |
| 663 | AGCCUGAACCACAGGUAC | 3239 | GUACCUGUGGUUCAGGCU | 4274 | Rh, Rb, Cw, Ms, Pg | [728-745] ORF |
| 664 | CGUUGCAAGACUGUGUAG | 3240 | CUACACAGUCUUGCAACG | 4275 | | [1359-1376] 3′UTR |
| 665 | CGUCACAGAUGCCAAGCA | 3241 | UGCUUGGCAUCUGUGACG | 4276 | | [1266-1283] 3′UTR |
| 666 | UGAGAAGGAAGUGGACUC | 3242 | GAGUCCACUUCCUUCUCA | 4277 | | [454-471] ORF |
| 667 | AUCCCUUCCUGGAAACAG | 3243 | CUGUUUCCAGGAAGGGAU | 4278 | Rh, Rb, Rt, Ms | [1036-1053] 3′UTR |
| 668 | CAAAGCACCUGUUAAGAC | 3244 | GUCUUAACAGGUGCUUUG | 4279 | Rh | [2523-2540] 3′UTR |
| 669 | AGGUCCCUUUCAUCUUGA | 3245 | UCAAGAUGAAAGGGACCU | 4280 | Rh | [1387-1404] 3′UTR |
| 670 | CCUUUUAGACAUGGUUGU | 3246 | ACAACCAUGUCUAAAAGG | 4281 | | [1112-1129] 3′UTR |
| 671 | AGCCUAGGAAGGGAAGGA | 3247 | UCCUUCCCUUCCUAGGCU | 4282 | Rh | [2054-2071] 3′UTR |
| 672 | GCUUUAUCCGGGCUUGUG | 3248 | CACAAGCCCGGAUAAAGC | 4283 | | [1873-1890] 3′UTR |
| 673 | CUCUUCUCCUAUUUUCAU | 3249 | AUGAAAAUAGGAGAAGAG | 4284 | | [3325-3342] 3′UTR |
| 674 | CGUAAUUUAAAGCUCUGU | 3250 | ACAGAGCUUUAAAUUACG | 4285 | | [3438-3455] 3′UTR |
| 675 | CCUAAAGUUGGUAAGAUG | 3251 | CAUCUUACCAACUUUAGG | 4286 | Rh | [2685-2702] 3′UTR |
| 676 | CUGUGCUGUGUUUUUUAU | 3252 | AUAAAAAACACAGCACAG | 4287 | Rh | [2884-2901] 3′UTR |
| 677 | ACCCAGAGUGGAACGCGU | 3253 | ACGCGUUCCACUCUGGGU | 4288 | | [2967-2984] 3′UTR |
| 678 | GUUCUAAGCACAGCUCUC | 3254 | GAGAGCUGUGCUUAGAAC | 4289 | | [3310-3327] 3′UTR |
| 679 | CUGUGUUUUUUAUUACCC | 3255 | GGGUAAUAAAAAACACAG | 4290 | Rh | [2889-2906] 3′UTR |
| 680 | GGACGGCAAGAUGCACAU | 3256 | AUGUGCAUCUUGCCGUCC | 4291 | | [655-672] ORF |
| 681 | GUUGAUUUUGUUUCCGUU | 3257 | AACGGAAACAAAAUCAAC | 4292 | | [3454-3471] 3′UTR |
| 682 | CUCCUUUUAGACAUGGUU | 3258 | AACCAUGUCUAAAAGGAG | 4293 | | [1110-1127] 3′UTR |
| 683 | UGAUGCUUUGUAUCAUUC | 3259 | GAAUGAUACAAAGCAUCA | 4294 | | [3588-3605] 3′UTR |
| 684 | CUUUAUCCGGGCUUGUGU | 3260 | ACACAAGCCCGGAUAAAG | 4295 | | [1874-1891] 3′UTR |
| 685 | AUAGAGUUUAUCUACACG | 3261 | CGUGUAGAUAAACUCUAU | 4296 | Dg, Pg | [557-574] ORF |
| 686 | GGGAUCUCCCAGCUGGGU | 3262 | ACCCAGCUGGGAGAUCCC | 4297 | | [1295-1312] 3′UTR |
| 687 | GUGAACCUGAGUUGCAGA | 3263 | UCUGCAACUCAGGUUCAC | 4298 | Rh | [2185-2202] 3′UTR |
| 688 | AGUGCCUCUGGAUGGACU | 3264 | AGUCCAUCCAGAGGCACU | 4299 | Rh, Rb, Cw, Dg, Rt, Ms | [813-830] ORF |
| 689 | GAAAGUUGACAAGCAGAC | 3265 | GUCUGCUUGUCAACUUUC | 4300 | | [3558-3575] 3′UTR |
| 690 | UUGCAAAAUGCUUCCAAA | 3266 | UUUGGAAGCAUUUUGCAA | 4301 | Rh | [2472-2489] 3′UTR |
| 691 | GUAAAGAUAAACUGACGA | 3267 | UCGUCAGUUUAUCUUUAC | 4302 | Rh | [2388-2405] 3′UTR |
| 692 | CCAAAGCCACCUUAGCCU | 3268 | AGGCUAAGGUGGCUUUGG | 4303 | Rh | [2485-2502] 3′UTR |
| 693 | AGAAAAAGCUGGGUCUUG | 3269 | CAAGACCCAGCUUUUUCU | 4304 | Rh | [1933-1950] 3′UTR |
| 694 | CUGCCGUAAUUUAAAGCU | 3270 | AGCUUUAAAUUACGGCAG | 4305 | | [3434-3451] 3′UTR |
| 695 | UCCCUUUCAUCUUGAGAG | 3271 | CUCUCAAGAUGAAAGGGA | 4306 | Rh | [1390-1407] 3′UTR |
| 696 | GAUCUUGAUGACUUCCCU | 3272 | AGGGAAGUCAUCAAGAUC | 4307 | Rh | [2596-2613] 3′UTR |
| 697 | UCAGUGUGGUUUCCUGAA | 3273 | UUCAGGAAACCACACUGA | 4308 | | [2290-2307] 3′UTR |
| 698 | GGAGCCUCCCUCUGAGCC | 3274 | GGCUCAGAGGGAGGCUCC | 4309 | Rh | [1597-1614] 3′UTR |
| 699 | UGGUAAGAUGUCAUAAUG | 3275 | CAUUAUGACAUCUUACCA | 4310 | Rh | [2693-2710] 3′UTR |
| 700 | AAGCAUUUGACCCAGAGU | 3276 | ACUCUGGGUCAAAUGCUU | 4311 | | [2958-2975] 3′UTR |
| 701 | AGCUAAGAAACUUCCUAG | 3277 | CUAGGAAGUUUCUUAGCU | 4312 | | [2247-2264] 3′UTR |
| 702 | CAGGUUAAGAAGAGCCGG | 3278 | CCGGCUCUUCUUAACCUG | 4313 | | [3184-3201] 3′UTR |
| 703 | GACUGCGCAUGUCUCUGA | 3279 | UCAGAGACAUGCGCAGUC | 4314 | | [3573-3590] 3′UTR |
| 704 | GUAGGUUCGGUCUGAAAG | 3280 | CUUUCAGACCGAACCUAC | 4315 | | [3103-3120] 3′UTR |
| 705 | UGAAAGUUGACAAGCAGA | 3281 | UCUGCUUGUCAACUUUCA | 4316 | | [3557-3574] 3′UTR |
| 706 | AACUUCUGCUUGUAUUUC | 3282 | GAAAUACAAGCAGAAGUU | 4317 | Rh | [2209-2226] 3′UTR |
| 707 | GACAAGCAGACUGCGCAU | 3283 | AUGCGCAGUCUGCUUGUC | 4318 | | [3565-3582] 3′UTR |
| 708 | AAGUCUGAGACCUUCCGG | 3284 | CCGGAAGGUCUCAGACUU | 4319 | | [3516-3533] 3′UTR |
| 709 | CUCUGACAUCCCUUCCUG | 3285 | CAGGAAGGGAUGUCAGAG | 4320 | Rh | [1029-1046] 3′UTR |
| 710 | GUAAACAUACACACGCAA | 3286 | UUGCGUGUGUAUGUUUAC | 4321 | Rh | [2422-2439] 3′UTR |
| 711 | CCUCUGGAUGGACUGGGU | 3287 | ACCCAGUCCAUCCAGAGG | 4322 | Rh, Rb, Cw, Dg, Rt, Ms, | [817-834] ORF |
| | | | | | Pg | |
| 712 | GAUGACUUCCCUUUCUAG | 3288 | CUAGAAAGGGAAGUCAUC | 4323 | Rh | [2602-2619] 3′UTR |
| 713 | CCUACCAGGUCCCUUUCA | 3289 | UGAAAGGGACCUGGUAGG | 4324 | Rh | [1381-1398] 3′UTR |
| 714 | CAAGGUCCUCAUCCCAUC | 3290 | GAUGGGAUGAGGACCUUG | 4325 | | [1153-1170] 3′UTR |
| 715 | GAUCUUUGAGUAGGUUCG | 3291 | CGAACCUACUCAAAGAUC | 4326 | | [3094-3111] 3′UTR |
| 716 | AGAAAUAUUGGACUUGCU | 3292 | AGCAAGUCCAAUAUUUCU | 4327 | | [3418-3435] 3′UTR |
| 717 | CUGCCCUCAAGGUCCCUU | 3293 | AAGGGACCUUGAGGGCAG | 4328 | Rh | [1782-1799] 3′UTR |
| 718 | CUAGGGAACCUAUGUGUU | 3294 | AACACAUAGGUUCCCUAG | 4329 | Rh | [2269-2286] 3′UTR |
| 719 | CAAGCAGGCAGCACUUAG | 3295 | CUAAGUGCUGCCUGCUUG | 4330 | | [1278-1295] 3′UTR |
| 720 | CCCACCGGGACCUGGUCA | 3296 | UGACCAGGUCCCGGUGGG | 4331 | | [2573-2590] 3′UTR |
| 721 | GUUUCUGCAUCGUGGAAG | 3297 | CUUCCACGAUGCAGAAAC | 4332 | Rh | [2943-2960] 3′UTR |
| 722 | GUGACCUAAAGUUGGUAA | 3298 | UUACCAACUUUAGGUCAC | 4333 | | [2681-2698] 3′UTR |
| 723 | UGGGAACACACAAGAGUU | 3299 | AACUCUUGUGUGUUCCCA | 4334 | | [3537-3554] 3′UTR |
| 724 | GAAUCGGUGAGGUCCUGU | 3300 | ACAGGACCUCACCGAUUC | 4335 | | [1737-1754] 3′UTR |
| 725 | CCCUCCCAGGCUUAGUGU | 3301 | ACACUAAGCCUGGGAGGG | 4336 | | [1956-1973] 3′UTR |
| 726 | CCCACAUCCAAGGGCAGC | 3302 | GCUGCCCUUGGAUGUGGG | 4337 | | [1515-1532] 3′UTR |
| 727 | AGCCUCCCUCUGAGCCUU | 3303 | AAGGCUCAGAGGGAGGCU | 4338 | Rh | [1599-1616] 3′UTR |
| 728 | CAUGAUCCCGUGCUACAU | 3304 | AUGUAGCACGGGAUCAUG | 4339 | Rh, Rb | [781-798] ORF |
| 729 | CAUAAUGGACCAGUCCAU | 3305 | AUGGACUGGUCCAUUAUG | 4340 | Rh | [2704-2721] 3′UTR |
| 730 | GUCACAGAUGCCAAGCAG | 3306 | CUGCUUGGCAUCUGUGAC | 4341 | | [1267-1284] 3′UTR |
| 731 | UGCAUCAAGAGAAGUGAC | 3307 | GUCACUUCUCUUGAUGCA | 4342 | | [878-895] ORF |
| 732 | GAGACCUUCCGGUGCUGG | 3308 | CCAGCACCGGAAGGUCUC | 4343 | | [3522-3539] 3′UTR |
| 733 | UACCUAGCUAAGAAACUU | 3309 | AAGUUUCUUAGCUAGGUA | 4344 | Rh | [2242-2259] 3′UTR |
| 734 | GCUGCGUUCCAGCCUCAG | 3310 | CUGAGGCUGGAACGCAGC | 4345 | | [1647-1664] 3′UTR |
| 735 | UGGUUUCCUGAAGCCAGU | 3311 | ACUGGCUUCAGGAAACCA | 4346 | | [2296-2313] 3′UTR |
| 736 | GCAGAUGUAGUGAUCAGG | 3312 | CCUGAUCACUACAUCUGC | 4347 | | [422-439] ORF |
| 737 | CACCUGGAUUGAGUUGCA | 3313 | UGCAACUCAAUCCAGGUG | 4348 | | [1848-1865] 3′UTR |
| 738 | UUGGUUCUCCAGUUCAAA | 3314 | UUUGAACUGGAGAACCAA | 4349 | | [3060-3077] 3′UTR |
| 739 | CUUGGCACCGUCACAGAU | 3315 | AUCUGUGACGGUGCCAAG | 4350 | Rh | [1258-1275] 3′UTR |
| 740 | CUUCCAAAGCCACCUUAG | 3316 | CUAAGGUGGCUUUGGAAG | 4351 | Rh | [2482-2499] 3′UTR |
| 741 | GGGCCUGGAAAUGUGCAU | 3317 | AUGCACAUUUCCAGGCCC | 4352 | Rh | [1320-1337] 3′UTR |
| 742 | CACGCGGCUUCCCUCCCA | 3318 | UGGGAGGGAAGCCGCGUG | 4353 | | [1232-1249] 3′UTR |
| 743 | CAAGUUCUUCGCCUGCAU | 3319 | AUGCAGGCGAAGAACUUG | 4354 | Rh, Rb, Cw, Dg, Ms | [865-882] ORF |
| 744 | CUGAAGCCAGUGAUAUGG | 3320 | CCAUAUCACUGGCUUCAG | 4355 | | [2303-2320] 3′UTR |
| 745 | UUCUCAGCCUCCAGGACA | 3321 | UGUCCUGGAGGCUGAGAA | 4356 | | [2110-2127] 3′UTR |
| 746 | UAUUACCCUUGGUAGGUA | 3322 | UACCUACCAAGGGUAAUA | 4357 | | [2899-2916] 3′UTR |
| 747 | AGGAUCUUUGAGUAGGUU | 3323 | AACCUACUCAAAGAUCCU | 4358 | | [3092-3109] 3′UTR |
| 748 | GGCUUCCCUCCCAGUCCC | 3324 | GGGACUGGGAGGGAAGCC | 4359 | | [1237-1254] 3′UTR |
| 749 | UCUCGGUAAUGAUAAGGA | 3325 | UCCUUAUCAUUACCGAGA | 4360 | | [2342-2359] 3′UTR |
| 750 | GCUUGCAGGAGGAAUCGG | 3326 | CCGAUUCCUCCUGCAAGC | 4361 | | [1726-1743] 3′UTR |
| 751 | GUGGUCUUGCAAAAUGCU | 3327 | AGCAUUUUGCAAGACCAC | 4362 | | [2466-2483] 3′UTR |
| 752 | CCUCAGCUGAGUCUUUUU | 3328 | AAAAAGACUCAGCUGAGG | 4363 | Rh | [1659-1676] 3′UTR |
| 753 | AGAAGUGACGGCUCCUGU | 3329 | ACAGGAGCCGUCACUUCU | 4364 | | [887-904] ORF |
| 754 | CGUGGUCUUGCAAAAUGC | 3330 | GCAUUUUGCAAGACCACG | 4365 | | [2465-2482] 3′UTR |
| 755 | ACCGGGACCUGGUCAGCA | 3331 | UGCUGACCAGGUCCCGGU | 4366 | | [2576-2593] 3′UTR |
| 756 | GAUCCACACACGUUGGUC | 3332 | GACCAACGUGUGUGGAUC | 4367 | | [3138-3155] 3′UTR |
| 757 | UAUAUUUGAUCCACACAC | 3333 | GUGUGUGGAUCAAAUAUA | 4368 | | [3131-3148] 3′UTR |
| 758 | ACCUAUGUGUUCCCUCAG | 3334 | CUGAGGGAACACAUAGGU | 4369 | | [2276-2293] 3′UTR |
| 759 | GUUUUUUAUUACCCUUGG | 3335 | CCAAGGGUAAUAAAAAAC | 4370 | Rh | [2893-2910] 3′UTR |
| 760 | GAAGUGGACUCUGGAAAC | 3336 | GUUUCCAGAGUCCACUUC | 4371 | | [461-478] ORF |
| 761 | CGCGGCUUCCCUCCCAGU | 3337 | ACUGGGAGGGAAGCCGCG | 4372 | | [1234-1251] 3′UTR |
| 762 | CCCUAUCAAGAGGAUCCA | 3338 | UGGAUCCUCUUGAUAGGG | 4373 | | [493-510] ORF |
| 763 | CCCGGACGAGUGCCUCUG | 3339 | CAGAGGCACUCGUCCGGG | 4374 | Rh, Rb, Cw | [805-822] ORF |
| 764 | CGGUUGCCAUUGCUUCUU | 3340 | AAGAAGCAAUGGCAACCG | 4375 | Rh | [1812-1829] 3′UTR |
| 765 | GCUGUGUUUUUUAUUACC | 3341 | GGUAAUAAAAAACACAGC | 4376 | Rh | [2888-2905] 3′UTR |
| 766 | CUUCCACGCCUCUGCACU | 3342 | AGUGCAGAGGCGUGGAAG | 4377 | | [1432-1449] 3′UTR |
| 767 | GGACCCAUAAGCAGGCCU | 3343 | AGGCCUGCUUAUGGGUCC | 4378 | Rh | [955-972] |
| | | | | | | ORF + 3′UTR |
| 768 | CUGGCAAGUGCUCCCAUC | 3344 | GAUGGGAGCACUUGCCAG | 4379 | | [1458-1475] 3′UTR |
| 769 | AAAGGUGUGGCCUUUAUA | 3345 | UAUAAAGGCCACACCUUU | 4380 | | [3117-3134] 3′UTR |
| 770 | ACAGGCACAUUAUGUAAA | 3346 | UUUACAUAAUGUGCCUGU | 4381 | | [2409-2426] 3′UTR |
| 771 | ACUUCCCUUUCUAGGGCA | 3347 | UGCCCUAGAAAGGGAAGU | 4382 | Rh | [2606-2623] 3′UTR |
| 772 | CUGUUGAUUUUGUUUCCG | 3348 | CGGAAACAAAAUCAACAG | 4383 | | [3452-3469] 3′UTR |
| 773 | CAAAGGGCCUGAGAAGGA | 3349 | UCCUUCUCAGGCCCUUUG | 4384 | | [538-555] ORF |
| 774 | CCUGAGCACCACCCAGAA | 3350 | UUCUGGGUGGUGCUCAGG | 4385 | Rh, Pg | [706-723] ORF |
| 775 | UCUUGAUGACUUCCCUUU | 3351 | AAAGGGAAGUCAUCAAGA | 4386 | Rh | [2598-2615] 3′UTR |
| 776 | GAGUGCAAGAUCACGCGC | 3352 | GCGCGUGAUCUUGCACUC | 4387 | Dg, Pg | [758-775] ORF |
| 777 | UUGUUUCCGUUUGGAUUU | 3353 | AAAUCCAAACGGAAACAA | 4388 | | [3461-3478] 3′UTR |
| 778 | CCUCCCAGUCCCUGCCUU | 3354 | AAGGCAGGGACUGGGAGG | 4389 | Rh | [1243-1260] 3′UTR |
| 779 | AGGCCUACCAGGUCCCUU | 3355 | AAGGGACCUGGUAGGCCU | 4390 | Rh | [1378-1395] 3′UTR |
| 780 | CAAGAUGCACAUCACCCU | 3356 | AGGGUGAUGUGCAUCUUG | 4391 | Rh, Dg | [661-678] ORF |
| 781 | UGGAGGAAAGAAGGAAUA | 3357 | UAUUCCUUCUUUCCUCCA | 4392 | Rt | [613-630] ORF |
| 782 | UGACAAAGAUUACCUAGC | 3358 | GCUAGGUAAUCUUUGUCA | 4393 | | [2232-2249] 3′UTR |
| 783 | GGUGGCUUUGGUGACACA | 3359 | UGUGUCACCAAAGCCACC | 4394 | | [2083-2100] 3′UTR |
| 784 | UCACUUCUUUCUCAGCCU | 3360 | AGGCUGAGAAAGAAGUGA | 4395 | | [2102-2119] 3′UTR |
| 785 | UAAUCAUUCCUGUGCUGU | 3361 | ACAGCACAGGAAUGAUUA | 4396 | Rh | [2875-2892] 3′UTR |
| 786 | AGUAGGUUCGGUCUGAAA | 3362 | UUUCAGACCGAACCUACU | 4397 | | [3102-3119] 3′UTR |
| 787 | CGUUUUGCAAUGCAGAUG | 3363 | CAUCUGCAUUGCAAAACG | 4398 | | [411-428] ORF |
| 788 | GGGCACCAGGCCAAGUUC | 3364 | GAACUUGGCCUGGUGCCC | 4399 | Rh, Rb, Rt, Ms | [854-871] ORF |
| 789 | ACAGAGAAGAACAUCAAC | 3365 | GUUGAUGUUCUUCUCUGU | 4400 | Rh | [836-853] ORF |
| 790 | CAAAAAAAGCCUCCAAGG | 3366 | CCUUGGAGGCUUUUUUUG | 4401 | | [995-1012] 3′UTR |
| 791 | UUGGUAGGUAUUAGACUU | 3367 | AAGUCUAAUACCUACCAA | 4402 | | [2907-2924] 3′UTR |
| 792 | GAGCACUGUGUUUAUGCU | 3368 | AGCAUAAACACAGUGCUC | 4403 | | [3490-3507] 3′UTR |
| 793 | UGUACAGUGACCUAAAGU | 3369 | ACUUUAGGUCACUGUACA | 4404 | | [2675-2692] 3′UTR |
| 794 | AAGAAAUAUUGGACUUGC | 3370 | GCAAGUCCAAUAUUUCUU | 4405 | | [3417-3434] 3′UTR |
| 795 | CAGAAACUUUUGAGGGUC | 3371 | GACCCUCAAAAGUUUCUG | 4406 | Rh | [1342-1359] 3′UTR |
| 796 | UUCCCUUUCUAGGGCAGA | 3372 | UCUGCCCUAGAAAGGGAA | 4407 | Rh | [2608-2625] 3′UTR |
| 797 | CACAUCCAAGGGCAGCCU | 3373 | AGGCUGCCCUUGGAUGUG | 4408 | | [1517-1534] 3′UTR |
| 798 | CAUCUUGAGAGGGACAUG | 3374 | CAUGUCCCUCUCAAGAUG | 4409 | | [1397-1414] 3′UTR |
| 799 | GGCUUUCUGCAUGUGACG | 3375 | CGUCACAUGCAGAAAGCC | 4410 | | [2012-2029] 3′UTR |
| 800 | UAGCUAAGAAACUUCCUA | 3376 | UAGGAAGUUUCUUAGCUA | 4411 | | [2246-2263] 3′UTR |
| 801 | ACAUCCAAGGGCAGCCUG | 3377 | CAGGCUGCCCUUGGAUGU | 4412 | | [1518-1535] 3′UTR |
| 802 | UGUUCCCUCCCUCAAAGA | 3378 | UCUUUGAGGGAGGGAACA | 4413 | | [1971-1988] 3′UTR |
| 803 | GUCUUUUUGGUCUGCACC | 3379 | GGUGCAGACCAAAAAGAC | 4414 | | [1669-1686] 3′UTR |
| 804 | CCAUGAGCUCCCAGCACC | 3380 | GGUGCUGGGAGCUCAUGG | 4415 | | [1489-1506] 3′UTR |
| 805 | AGAUGUAGUGAUCAGGGC | 3381 | GCCCUGAUCACUACAUCU | 4416 | | [424-441] ORF |
| 806 | GAGGUAGGUGGCUUUGGU | 3382 | ACCAAAGCCACCUACCUC | 4417 | Rh | [2077-2094] 3′UTR |
| 807 | AAGCCGCUCAAAUACCUU | 3383 | AAGGUAUUUGAGCGGCUU | 4418 | | [3219-3236] 3′UTR |
| 808 | UGAGCCUUGUAGAAAUGG | 3384 | CCAUUUCUACAAGGCUCA | 4419 | Rh | [1609-1626] 3′UTR |
| 809 | GACGCCAGCUAAGCAUAG | 3385 | CUAUGCUUAGCUGGCGUC | 4420 | | [2026-2043] 3′UTR |
| 810 | GCAGCUUCCACGCCUCUG | 3386 | CAGAGGCGUGGAAGCUGC | 4421 | Rh | [1428-1445] 3′UTR |
| 811 | AGAAUUCCAGUGGGAGCC | 3387 | GGCUCCCACUGGAAUUCU | 4422 | Rh | [1585-1602] 3′UTR |
| 812 | GAACGCGUGGCCUAUGCA | 3388 | UGCAUAGGCCACGCGUUC | 4423 | Rh | [2977-2994] 3′UTR |
| 813 | ACAGAAAAAGCUGGGUCU | 3389 | AGACCCAGCUUUUUCUGU | 4424 | Rh | [1931-1948] 3′UTR |
| 814 | AAGGAAUAUCUCAUUGCA | 3390 | UGCAAUGAGAUAUUCCUU | 4425 | | [623-640] ORF |
| 815 | CAAGAGGAUCCAGUAUGA | 3391 | UCAUACUGGAUCCUCUUG | 4426 | Rh, Rb | [499-516] ORF |
| 816 | AGCUGACAGAGGAAGCCG | 3392 | CGGCUUCCUCUGUCAGCU | 4427 | | [3207-3224] 3′UTR |
| 817 | AUAAAACACUCAUCCCAU | 3393 | AUGGGAUGAGUGUUUUAU | 4428 | | [1059-1076] 3′UTR |
| 818 | GAAUCUCUUGUUUCCUCC | 3394 | GGAGGAAACAAGAGAUUC | 4429 | | [2360-2377] 3′UTR |
| 819 | GUUAUGUUCUAAGCACAG | 3395 | CUGUGCUUAGAACAUAAC | 4430 | | [3305-3322] 3′UTR |
| 820 | ACACGUUGGUCUUUUAAC | 3396 | GUUAAAAGACCAACGUGU | 4431 | | [3145-3162] 3′UTR |
| 821 | GGUGCACCCGCAACAGGC | 3397 | GCCUGUUGCGGGUGCACC | 4432 | Cw, Dg, Rt, Ms | [394-411] ORF |
| 822 | UCUGCAUCGUGGAAGCAU | 3398 | AUGCUUCCACGAUGCAGA | 4433 | Rh | [2946-2963] 3′UTR |
| 823 | CUGCCAGGCACUAUGUGU | 3399 | ACACAUAGUGCCUGGCAG | 4434 | | [1177-1194] 3′UTR |
| 824 | GAAGUCUGAGACCUUCCG | 3400 | CGGAAGGUCUCAGACUUC | 4435 | | [3515-3532] 3′UTR |
| 825 | CUGGUCAGCACAGAUCUU | 3401 | AAGAUCUGUGCUGACCAG | 4436 | Rh | [2584-2601] 3′UTR |
| 826 | GUGCAUUUUGCAGAAACU | 3402 | AGUUUCUGCAAAAUGCAC | 4437 | Rh, Rt, Ms | [1332-1349] 3′UTR |
| 827 | UCAUCUUGAGAGGGACAU | 3403 | AUGUCCCUCUCAAGAUGA | 4438 | | [1396-1413] 3′UTR |
| 828 | CACUUAGGGAUCUCCCAG | 3404 | CUGGGAGAUCCCUAAGUG | 4439 | Rh | [1289-1306] 3′UTR |
| 829 | CACGCAAUGAAACCGAAG | 3405 | CUUCGGUUUCAUUGCGUG | 4440 | | [2433-2450] 3′UTR |
| 830 | GACUGACAGCCAUCGUUC | 3406 | GAACGAUGGCUGUCAGUC | 4441 | Rh | [1987-2004] 3′UTR |
| 831 | AUUGCAAAGUAAAGGAUC | 3407 | GAUCCUUUACUUUGCAAU | 4442 | | [3080-3097] 3′UTR |
| 832 | AGUGGAACGCGUGGCCUA | 3408 | UAGGCCACGCGUUCCACU | 4443 | | [2973-2990] 3′UTR |
| 833 | GUUCGGUCUGAAAGGUGU | 3409 | ACACCUUUCAGACCGAAC | 4444 | | [3107-3124] 3′UTR |
| 834 | UGCAGAUGUAGUGAUCAG | 3410 | CUGAUCACUACAUCUGCA | 4445 | | [421-438] ORF |
| 835 | GUGUUCCCUCAGUGUGGU | 3411 | ACCACACUGAGGGAACAC | 4446 | | [2282-2299] 3′UTR |
| 836 | UGCCGUAAUUUAAAGCUC | 3412 | GAGCUUUAAAUUACGGCA | 4447 | | [3435-3452] 3′UTR |
| 837 | CUGCGGUUGCCAUUGCUU | 3413 | AAGCAAUGGCAACCGCAG | 4448 | | [1809-1826] 3′UTR |
| 838 | CGGCUCCUGUGCGUGGUA | 3414 | UACCACGCACAGGAGCCG | 4449 | Rh | [895-912] ORF |
| 839 | GGGUUUCGACUGGUCCAG | 3415 | CUGGACCAGUCGAAACCC | 4450 | Rh | [1011-1028] 3′UTR |
| 840 | AGAGAAGAACAUCAACGG | 3416 | CCGUUGAUGUUCUUCUCU | 4451 | Rh, Rb, Cw | [838-855] ORF |
| 841 | AUGGACCAGUCCAUGUGA | 3417 | UCACAUGGACUGGUCCAU | 4452 | Rh | [2708-2725] 3′UTR |
| 842 | CCGUGCUACAUCUCCUCC | 3418 | GGAGGAGAUGUAGCACGG | 4453 | Rh | [788-805] ORF |
| 843 | CCAAAGCACCUGUUAAGA | 3419 | UCUUAACAGGUGCUUUGG | 4454 | Rh | [2522-2539] 3′UTR |
| 844 | CAACUGCAAAAAAAGCCU | 3420 | AGGCUUUUUUUGCAGUUG | 4455 | | [989-1006] 3′UTR |
| 845 | CUUUCUCAGCCUCCAGGA | 3421 | UCCUGGAGGCUGAGAAAG | 4456 | | [2108-2125] 3′UTR |
| 846 | UCUAAAGGUGAAUUCUCA | 3422 | UGAGAAUUCACCUUUAGA | 4457 | Ms | [2159-2176] 3′UTR |
| 847 | GCAGACUGGGAGGGUAUC | 3423 | GAUACCCUCCCAGUCUGC | 4458 | Rh | [2621-2638] 3′UTR |
| 848 | CUGGAACCAGUGGCUAGU | 3424 | ACUAGCCACUGGUUCCAG | 4459 | | [1533-1550] 3′UTR |
| 849 | GACUGUGUAGCAGGCCUA | 3425 | UAGGCCUGCUACACAGUC | 4460 | Rh | [1367-1384] 3′UTR |
| 850 | GGCCAAGUUCUUCGCCUG | 3426 | CAGGCGAAGAACUUGGCC | 4461 | Rh, Rb, Cw, Dg, Ms | [862-879] ORF |
| 851 | GUUCGCUUCCUGUAUGGU | 3427 | ACCAUACAGGAAGCGAAC | 4462 | | [2781-2798] 3′UTR |
| 852 | AAUUCCAGUGGGAGCCUC | 3428 | GAGGCUCCCACUGGAAUU | 4463 | Rh | [1587-1604] 3′UTR |
| 853 | UGCAAAAUGCUUCCAAAG | 3429 | CUUUGGAAGCAUUUUGCA | 4464 | Rh | [2473-2490] 3′UTR |
| 854 | CUGGAAUAUGAAGUCUGA | 3430 | UCAGACUUCAUAUUCCAG | 4465 | Ms | [3506-3523] 3′UTR |
| 855 | GCUGUGCCCUCCCAGGCU | 3431 | AGCCUGGGAGGGCACAGC | 4466 | | [1950-1967] 3′UTR |
| 856 | CCAGAUGGGCUGCGAGUG | 3432 | CACUCGCAGCCCAUCUGG | 4467 | Rh, Ck, Rb, Rt | [745-762] ORF |
| 857 | GCGGUUGCCAUUGCUUCU | 3433 | AGAAGCAAUGGCAACCGC | 4468 | | [1811-1828] 3′UTR |
| 858 | AGCUCUGUUGAUUUUGUU | 3434 | AACAAAAUCAACAGAGCU | 4469 | | [3448-3465] 3′UTR |
| 859 | UAUCAUUCUUGAGCAAUC | 3435 | GAUUGCUCAAGAAUGAUA | 4470 | | [3598-3615] 3′UTR |
| 860 | UGGAGGGAGACGUGGGUC | 3436 | GACCCACGUCUCCCUCCA | 4471 | | [1135-1152] 3′UTR |
| 861 | AAGAAACUUCCUAGGGAA | 3437 | UUCCCUAGGAAGUUUCUU | 4472 | | [2251-2268] 3′UTR |
| 862 | AAAGCUGGGUCUUGCUGU | 3438 | ACAGCAAGACCCAGCUUU | 4473 | Rh | [1937-1954] 3′UTR |
| 863 | AAUAUGAAGUCUGAGACC | 3439 | GGUCUCAGACUUCAUAUU | 4474 | | [3510-3527] 3′UTR |
| 864 | UUCCUGAAGCCAGUGAUA | 3440 | UAUCACUGGCUUCAGGAA | 4475 | | [2300-2317] 3′UTR |
| 865 | ACUCCUGUUUCUGCUGAU | 3441 | AUCAGCAGAAACAGGAGU | 4476 | | [2818-2835] 3′UTR |
| 866 | CCAGGCUUAGUGUUCCCU | 3442 | AGGGAACACUAAGCCUGG | 4477 | | [1961-1978] 3′UTR |
| 867 | CCAGAGUGGAACGCGUGG | 3443 | CCACGCGUUCCACUCUGG | 4478 | | [2969-2986] 3′UTR |
| 868 | ACCAGGUCCCUUUCAUCU | 3444 | AGAUGAAAGGGACCUGGU | 4479 | Rh | [1384-1401] 3′UTR |
| 869 | CGAGUGCCUCUGGAUGGA | 3445 | UCCAUCCAGAGGCACUCG | 4480 | Rh, Rb, Cw, Dg, Rt, Ms | [811-828] ORF |
| 870 | UAUGUGUUCCCUCAGUGU | 3446 | ACACUGAGGGAACACAUA | 4481 | | [2279-2296] 3′UTR |
| 871 | GUUUUCAUGCUGUACAGU | 3447 | ACUGUACAGCAUGAAAAC | 4482 | Rh | [2665-2682] 3′UTR |
| 872 | GACUGGGAGGGUAUCCAG | 3448 | CUGGAUACCCUCCCAGUC | 4483 | Rh | [2624-2641] 3′UTR |
| 873 | GUCAGCACAGAUCUUGAU | 3449 | AUCAAGAUCUGUGCUGAC | 4484 | Rh | [2587-2604] 3′UTR |
| 874 | CGGCCUGGGCGUGGUCUU | 3450 | AAGACCACGCCCAGGCCG | 4485 | | [2456-2473] 3′UTR |
| 875 | CUGCGAGUGCAAGAUCAC | 3451 | GUGAUCUUGCACUCGCAG | 4486 | Rt | [754-771] ORF |
| 876 | UGAAAGGUGUGGCCUUUA | 3452 | UAAAGGCCACACCUUUCA | 4487 | | [3115-3132] 3′UTR |
| 877 | UGUUCUGGCAUCAGGCAC | 3453 | GUGCCUGAUGCCAGAACA | 4488 | | [1833-1850] 3′UTR |
| 878 | GGGCUUGUGUGCAGGGCC | 3454 | GGCCCUGCACACAAGCCC | 4489 | Rh | [1882-1899] 3′UTR |
| 879 | CCACCCAGAAGAAGAGCC | 3455 | GGCUCUUCUUCUGGGUGG | 4490 | Rh, Ck, Cw, Rt, Ms, Pg | [714-731] ORF |
| 880 | CAGCUGAGCUGCGUUCCA | 3456 | UGGAACGCAGCUCAGCUG | 4491 | | [1640-1657] 3′UTR |
| 881 | UCUGGAUGGACUGGGUCA | 3457 | UGACCCAGUCCAUCCAGA | 4492 | Rh, Rb, Cw, Dg, Rt, Ms, | [819-836] ORF |
| | | | | | Pg | |
| 882 | CCCAAGCAGGAGUUUCUC | 3458 | GAGAAACUCCUGCUUGGG | 4493 | Dg | [929-946] ORF |
| 883 | AAGGUGUGGCCUUUAUAU | 3459 | AUAUAAAGGCCACACCUU | 4494 | | [3118-3135] 3′UTR |
| 884 | CCUCCCAGGCUUAGUGUU | 3460 | AACACUAAGCCUGGGAGG | 4495 | | [1957-1974] 3′UTR |
| 885 | CCAACUGCAAAAAAAGCC | 3461 | GGCUUUUUUUGCAGUUGG | 4496 | | [988-1005] 3′UTR |
| 886 | CUGGAUUGAGUUGCACAG | 3462 | CUGUGCAACUCAAUCCAG | 4497 | | [1851-1868] 3′UTR |
| 887 | AUGGCCUGUUUUAAGAGA | 3463 | UCUCUUAAAACAGGCCAU | 4498 | | [2130-2147] 3′UTR |
| 888 | UGUAUCAUUCUUGAGCAA | 3464 | UUGCUCAAGAAUGAUACA | 4499 | | [3596-3613] 3′UTR |
| 889 | AGAGUUUAUCUACACGGC | 3465 | GCCGUGUAGAUAAACUCU | 4500 | Dg, Ms, Pg | [559-576] ORF |
| 890 | CGGGACCUGGUCAGCACA | 3466 | UGUGCUGACCAGGUCCCG | 4501 | Rh | [2578-2595] 3′UTR |
| 891 | AUGACAAAGAUUACCUAG | 3467 | CUAGGUAAUCUUUGUCAU | 4502 | | [2231-2248] 3′UTR |
| 892 | UGAAGCCAGUGAUAUGGG | 3468 | CCCAUAUCACUGGCUUCA | 4503 | | [2304-2321] 3′UTR |
| 893 | GUGGCCUUUAUAUUUGAU | 3469 | AUCAAAUAUAAAGGCCAC | 4504 | | [3123-3140] 3′UTR |
| 894 | UAAGCAUAGUAAGAAGUC | 3470 | GACUUCUUACUAUGCUUA | 4505 | | [2035-2052] 3′UTR |
| 895 | CUGCACAUCCUGAGGACA | 3471 | UGUCCUCAGGAUGUGCAG | 4506 | Rh | [1916-1933] 3′UTR |
| 896 | AGUUGACAAGCAGACUGC | 3472 | GCAGUCUGCUUGUCAACU | 4507 | | [3561-3578] 3′UTR |
| 897 | UGAGCUCCCAGCACCUGA | 3473 | UCAGGUGCUGGGAGCUCA | 4508 | | [1492-1509] 3′UTR |
| 898 | CUGUUAAGACUCCUGACC | 3474 | GGUCAGGAGUCUUAACAG | 4509 | Rh | [2531-2548] 3′UTR |
| 899 | CACAUCACCCUCUGUGAC | 3475 | GUCACAGAGGGUGAUGUG | 4510 | Rh | [668-685] ORF |
| 900 | AAAGUUGACAAGCAGACU | 3476 | AGUCUGCUUGUCAACUUU | 4511 | | [3559-3576] 3′UTR |
| 901 | CCAAGUGGCAUGCAGCCC | 3477 | GGGCUGCAUGCCACUUGG | 4512 | | [2550-2567] 3′UTR |
| 902 | GUACCAGAUGGGCUGCGA | 3478 | UCGCAGCCCAUCUGGUAC | 4513 | Rh, Ck, Rb, Rt | [742-759] ORF |
| 903 | UGUUUCCGUUUGGAUUUU | 3479 | AAAAUCCAAACGGAAACA | 4514 | | [3462-3479] 3′UTR |
| 904 | AUCUUUGAGUAGGUUCGG | 3480 | CCGAACCUACUCAAAGAU | 4515 | | [3095-3112] 3′UTR |
| 905 | UGAUCCCGUGCUACAUCU | 3481 | AGAUGUAGCACGGGAUCA | 4516 | Rh, Rb | [783-800] ORF |
| 906 | ACCUGGUCAGCACAGAUC | 3482 | GAUCUGUGCUGACCAGGU | 4517 | Rh | [2582-2599] 3′UTR |
| 907 | CACUUCUUUCUCAGCCUC | 3483 | GAGGCUGAGAAAGAAGUG | 4518 | | [2103-2120] 3′UTR |
| 908 | GCUGCUGCGGUUGCCAUU | 3484 | AAUGGCAACCGCAGCAGC | 4519 | | [1805-1822] 3′UTR |
| 909 | CAUUGCUUCUUGCCUGUU | 3485 | AACAGGCAAGAAGCAAUG | 4520 | | [1819-1836] 3′UTR |
| 910 | CUGGAGGGAGACGUGGGU | 3486 | ACCCACGUCUCCCUCCAG | 4521 | | [1134-1151] 3′UTR |
| 911 | UGGUGACACACUCACUUC | 3487 | GAAGUGAGUGUGUCACCA | 4522 | | [2091-2108] 3′UTR |
| 912 | GGCAGGGCUGGGACACGC | 3488 | GCGUGUCCCAGCCCUGCC | 4523 | | [1219-1236] 3′UTR |
| 913 | UGAACCACAGGUACCAGA | 3489 | UCUGGUACCUGUGGUUCA | 4524 | Rh, Rb, Cw, Ms, Pg | [732-749] ORF |
| 914 | GUUAGGAUAGGAAGAACU | 3490 | AGUUCUUCCUAUCCUAAC | 4525 | | [2323-2340] 3′UTR |
| 915 | AGCUUUGCUUUAUCCGGG | 3491 | CCCGGAUAAAGCAAAGCU | 4526 | | [1867-1884] 3′UTR |
| 916 | CUGUCCUGAGGCUGCUGU | 3492 | ACAGCAGCCUCAGGACAG | 4527 | Rh | [1751-1768] 3′UTR |
| 917 | AUUGCUUCUUGCCUGUUC | 3493 | GAACAGGCAAGAAGCAAU | 4528 | | [1820-1837] 3′UTR |
| 918 | GAGCACCACCCAGAAGAA | 3494 | UUCUUCUGGGUGGUGCUC | 4529 | Rh, Pg | [709-726] ORF |
| 919 | GUAGUGAUCAGGGCCAAA | 3495 | UUUGGCCCUGAUCACUAC | 4530 | Cw, Rt, Pg | [428-445] ORF |
| 920 | CCUGUUAAGACUCCUGAC | 3496 | GUCAGGAGUCUUAACAGG | 4531 | Rh | [2530-2547] 3′UTR |
| 921 | AGGGUUUCGACUGGUCCA | 3497 | UGGACCAGUCGAAACCCU | 4532 | Rh | [1010-1027] 3′UTR |
| 922 | UCAUCCCAUGGGUCCAAA | 3498 | UUUGGACCCAUGGGAUGA | 4533 | | [1068-1085] 3′UTR |
| 923 | GCCCUUGUUUUCUGCAGC | 3499 | GCUGCAGAAAACAAGGGC | 4534 | Rh | [1415-1432] 3′UTR |
| 924 | GUUGACAAGCAGACUGCG | 3500 | CGCAGUCUGCUUGUCAAC | 4535 | | [3562-3579] 3′UTR |
| 925 | AGGGAACCUAUGUGUUCC | 3501 | GGAACACAUAGGUUCCCU | 4536 | Rh | [2271-2288] 3′UTR |
| 926 | CCCAGCUGGGUUAGGGCA | 3502 | UGCCCUAACCCAGCUGGG | 4537 | | [1302-1319] 3′UTR |
| 927 | GUUGGUCUUUUAACCGUG | 3503 | CACGGUUAAAAGACCAAC | 4538 | | [3149-3166] 3′UTR |
| 928 | UUAUGGCAACCCUAUCAA | 3504 | UUGAUAGGGUUGCCAUAA | 4539 | | [484-501] ORF |
| 929 | CUAAAGUUGGUAAGAUGU | 3505 | ACAUCUUACCAACUUUAG | 4540 | Rh | [2686-2703] 3′UTR |
| 930 | UGAAUUCUCAGAUGAUAG | 3506 | CUAUCAUCUGAGAAUUCA | 4541 | | [2167-2184] 3′UTR |
| 931 | UGCAGGUGGAUUCCUUCA | 3507 | UGAAGGAAUCCACCUGCA | 4542 | Rh | [2991-3008] 3′UTR |
| 932 | CUGCGCAUGUCUCUGAUG | 3508 | CAUCAGAGACAUGCGCAG | 4543 | | [3575-3592] 3′UTR |
| 933 | GAAGAACAUCAACGGGCA | 3509 | UGCCCGUUGAUGUUCUUC | 4544 | Rh, Rb | [841-858] ORF |
| 934 | GGCGCUCGGCCUCCUGCU | 3510 | AGCAGGAGGCCGAGCGCC | 4545 | Dg, Rt, Ms | [331-348] ORF |
| 935 | CUGAGGACAGAAAAAGCU | 3511 | AGCUUUUUCUGUCCUCAG | 4546 | Rh | [1925-1942] 3′UTR |
| 936 | AUCUUGAUGACUUCCCUU | 3512 | AAGGGAAGUCAUCAAGAU | 4547 | Rh | [2597-2614] 3′UTR |
| 937 | UAGGUAUUAGACUUGCAC | 3513 | GUGCAAGUCUAAUACCUA | 4548 | | [2911-2928] 3′UTR |
| 938 | UGAAGUCUGAGACCUUCC | 3514 | GGAAGGUCUCAGACUUCA | 4549 | | [3514-3531] 3′UTR |
| 939 | CCGUAAUUUAAAGCUCUG | 3515 | CAGAGCUUUAAAUUACGG | 4550 | | [3437-3454] 3′UTR |
| 940 | AAGGCUCUCCAUUUGGCA | 3516 | UGCCAAAUGGAGAGCCUU | 4551 | | [3272-3289] 3′UTR |
| 941 | UAGGGAACCUAUGUGUUC | 3517 | GAACACAUAGGUUCCCUA | 4552 | Rh | [2270-2287] 3′UTR |
| 942 | GCUCCCAGCACCUGACUC | 3518 | GAGUCAGGUGCUGGGAGC | 4553 | | [1495-1512] 3′UTR |
| 943 | UGGAUUGAGUUGCACAGC | 3519 | GCUGUGCAACUCAAUCCA | 4554 | | [1852-1869] 3′UTR |
| 944 | CUGCUGGCGACGCUGCUU | 3520 | AAGCAGCGUCGCCAGCAG | 4555 | | [347-364] ORF |
| 945 | CUGCGUUCCAGCCUCAGC | 3521 | GCUGAGGCUGGAACGCAG | 4556 | | [1648-1665] 3′UTR |
| 946 | GUGACUUCAUCGUGCCCU | 3522 | AGGGCACGAUGAAGUCAC | 4557 | Rh, Rb, Cw, Dg, Pg | [681-698] ORF |
| 947 | GCCCUGGGACACCCUGAG | 3523 | CUCAGGGUGUCCCAGGGC | 4558 | Rh, Cw, Dg, Pg | [694-711] ORF |
| 948 | UAUACAACUCCACCAGAC | 3524 | GUCUGGUGGAGUUGUAUA | 4559 | Rh | [2734-2751] 3′UTR |
| 949 | ACCUUCCGGUGCUGGGAA | 3525 | UUCCCAGCACCGGAAGGU | 4560 | | [3525-3542] 3′UTR |
| 950 | GCUUUCUGCAUGUGACGC | 3526 | GCGUCACAUGCAGAAAGC | 4561 | | [2013-2030] 3′UTR |
| 951 | CCACAUCCAAGGGCAGCC | 3527 | GGCUGCCCUUGGAUGUGG | 4562 | | [1516-1533] 3′UTR |
| 952 | GCAGCACUUAGGGAUCUC | 3528 | GAGAUCCCUAAGUGCUGC | 4563 | Rh | [1285-1302] 3′UTR |
| 953 | UGGGUCCAAGGUCCUCAU | 3529 | AUGAGGACCUUGGACCCA | 4564 | | [1147-1164] 3′UTR |
| 954 | UCUAGGGCAGACUGGGAG | 3530 | CUCCCAGUCUGCCCUAGA | 4565 | Rh | [2615-2632] 3′UTR |
| 955 | GAAGGGAAGGAUUUUGGA | 3531 | UCCAAAAUCCUUCCCUUC | 4566 | Rh | [2061-2078] 3′UTR |
| 956 | GAGGAAUCGGUGAGGUCC | 3532 | GGACCUCACCGAUUCCUC | 4567 | | [1734-1751] 3′UTR |
| 957 | AUUUGACCCAGAGUGGAA | 3533 | UUCCACUCUGGGUCAAAU | 4568 | | [2962-2979] 3′UTR |
| 958 | GGCGACGCUGCUUCGCCC | 3534 | GGGCGAAGCAGCGUCGCC | 4569 | | [352-369] ORF |
| 959 | UUAGCCUGUUCUAUUCAG | 3535 | CUGAAUAGAACAGGCUAA | 4570 | Rh | [2496-2513] 3′UTR |
| 960 | AGCUGAGCUGCGUUCCAG | 3536 | CUGGAACGCAGCUCAGCU | 4571 | | [1641-1658] 3′UTR |
| 961 | AAGUUGACAAGCAGACUG | 3537 | CAGUCUGCUUGUCAACUU | 4572 | | [3560-3577] 3′UTR |
| 962 | AGCACAGAUCUUGAUGAC | 3538 | GUCAUCAAGAUCUGUGCU | 4573 | Rh | [2590-2607] 3′UTR |
| 963 | GAGGGUAUCCAGGAAUCG | 3539 | CGAUUCCUGGAUACCCUC | 4574 | | [2630-2647] 3′UTR |
| 964 | AGUGUGGUUUCCUGAAGC | 3540 | GCUUCAGGAAACCACACU | 4575 | | [2292-2309] 3′UTR |
| 965 | UCCUUUUAGACAUGGUUG | 3541 | CAACCAUGUCUAAAAGGA | 4576 | | [1111-1128] 3′UTR |
| 966 | GUUUCCUCCCACCUGUGU | 3542 | ACACAGGUGGGAGGAAAC | 4577 | | [2369-2386] 3′UTR |
| 967 | CACUAUGGCCUGUUUUAA | 3543 | UUAAAACAGGCCAUAGUG | 4578 | | [2126-2143] 3′UTR |
| 968 | CCAGCUGGGUUAGGGCAG | 3544 | CUGCCCUAACCCAGCUGG | 4579 | | [1303-1320] 3′UTR |
| 969 | UGCGUUCCAGCCUCAGCU | 3545 | AGCUGAGGCUGGAACGCA | 4580 | | [1649-1666] 3′UTR |
| 970 | CCAGCCUAGGAAGGGAAG | 3546 | CUUCCCUUCCUAGGCUGG | 4581 | Rh | [2052-2069] 3′UTR |
| 971 | GCUGGGUCUUGCUGUGCC | 3547 | GGCACAGCAAGACCCAGC | 4582 | Rh | [1940-1957] 3′UTR |
| 972 | GUUUCUCGACAUCGAGGA | 3548 | UCCUCGAUGUCGAGAAAC | 4583 | Ck, Dg | [940-957] ORF |
| 973 | GCUGGGACACGCGGCUUC | 3549 | GAAGCCGCGUGUCCCAGC | 4584 | | [1225-1242] 3′UTR |
| 974 | UACCAACUUCUGCUUGUA | 3550 | UACAAGCAGAAGUUGGUA | 4585 | Rh | [2205-2222] 3′UTR |
| 975 | UCCAAGGGCAGCCUGGAA | 3551 | UUCCAGGCUGCCCUUGGA | 4586 | | [1521-1538] 3′UTR |
| 976 | CAACCCUAUCAAGAGGAU | 3552 | AUCCUCUUGAUAGGGUUG | 4587 | | [490-507] ORF |
| 977 | CAGCUGAGUCUUUUUGGU | 3553 | ACCAAAAAGACUCAGCUG | 4588 | Rh | [1662-1679] 3′UTR |
| 978 | UGUUAAGACUCCUGACCC | 3554 | GGGUCAGGAGUCUUAACA | 4589 | Rh | [2532-2549] 3′UTR |
| 979 | UAUCAAGAGGAUCCAGUA | 3555 | UACUGGAUCCUCUUGAUA | 4590 | Rh, Rb | [496-513] ORF |
| 980 | GCACCAGGCCAAGUUCUU | 3556 | AAGAACUUGGCCUGGUGC | 4591 | Rh, Rb, Cw, Rt, Ms | [856-873] ORF |
| 981 | GGGCUGGGACACGCGGCU | 3557 | AGCCGCGUGUCCCAGCCC | 4592 | | [1223-1240] 3′UTR |
| 982 | GGUCCCUUCCCUAGCUGC | 3558 | GCAGCUAGGGAAGGGACC | 4593 | | [1792-1809] 3′UTR |
| 983 | UGAUAGGUGAACCUGAGU | 3559 | ACUCAGGUUCACCUAUCA | 4594 | | [2179-2196] 3′UTR |
| 984 | AUUCCUGUGCUGUGUUUU | 3560 | AAAACACAGCACAGGAAU | 4595 | Rh | [2880-2897] 3′UTR |
| 985 | GAUGCACAUCACCCUCUG | 3561 | CAGAGGGUGAUGUGCAUC | 4596 | Rh | [664-681] ORF |
| 986 | CCAGGCACUAUGUGUCUG | 3562 | CAGACACAUAGUGCCUGG | 4597 | | [1180-1197] 3′UTR |
| 987 | GCUGCUGGCGACGCUGCU | 3563 | AGCAGCGUCGCCAGCAGC | 4598 | | [346-363] ORF |
| 988 | UCCAGUGGGAGCCUCCCU | 3564 | AGGGAGGCUCCCACUGGA | 4599 | Rh | [1590-1607] 3′UTR |
| 989 | AGCUCUGACAUCCCUUCC | 3565 | GGAAGGGAUGUCAGAGCU | 4600 | Rh | [1027-1044] 3′UTR |
| 990 | ACAGCUUUGCUUUAUCCG | 3566 | CGGAUAAAGCAAAGCUGU | 4601 | | [1865-1882] 3′UTR |
| 991 | GGGAACCUAUGUGUUCCC | 3567 | GGGAACACAUAGGUUCCC | 4602 | Rh | [2272-2289] 3′UTR |
| 992 | CAGGAGUUUCUCGACAUC | 3568 | GAUGUCGAGAAACUCCUG | 4603 | Ck, Dg | [935-952] ORF |
| 993 | GUCCCUUCCCUAGCUGCU | 3569 | AGCAGCUAGGGAAGGGAC | 4604 | | [1793-1810] 3′UTR |
| 994 | AGGUUCGGUCUGAAAGGU | 3570 | ACCUUUCAGACCGAACCU | 4605 | | [3105-3122] 3′UTR |
| 995 | UGACGAUAUACAGGCACA | 3571 | UGUGCCUGUAUAUCGUCA | 4606 | | [2400-2417] 3′UTR |
| 996 | AGUCUUUUUGGUCUGCAC | 3572 | GUGCAGACCAAAAAGACU | 4607 | | [1668-1685] 3′UTR |
| 997 | CACCCUGAGCACCACCCA | 3573 | UGGGUGGUGCUCAGGGUG | 4608 | Rh, Pg | [703-720] ORF |
| 998 | GAGAAGAACAUCAACGGG | 3574 | CCCGUUGAUGUUCUUCUC | 4609 | Rh, Rb | [839-856] ORF |
| 999 | GAGAAGUGACGGCUCCUG | 3575 | CAGGAGCCGUCACUUCUC | 4610 | | [886-903] ORF |
| 1000 | UGCGAGUGCAAGAUCACG | 3576 | CGUGAUCUUGCACUCGCA | 4611 | | [755-772] ORF |
| 1001 | AAGUAAAGGAUCUUUGAG | 3577 | CUCAAAGAUCCUUUACUU | 4612 | | [3086-3103] 3′UTR |
| 1002 | AGGCACAUUAUGUAAACA | 3578 | UGUUUACAUAAUGUGCCU | 4613 | Rh | [2411-2428] 3′UTR |
| 1003 | CGCUCGGUCCGUGGACAA | 3579 | UUGUCCACGGACCGAGCG | 4614 | | [3615-3632] 3′UTR |
| 1004 | GUUAAGAAGAGCCGGGUG | 3580 | CACCCGGCUCUUCUUAAC | 4615 | | [3187-3204] 3′UTR |
| 1005 | GUGGAACGCGUGGCCUAU | 3581 | AUAGGCCACGCGUUCCAC | 4616 | | [2974-2991] 3′UTR |
| 1006 | AAAGUUGGUAAGAUGUCA | 3582 | UGACAUCUUACCAACUUU | 4617 | Rh | [2688-2705] 3′UTR |
| 1007 | AGCUGCUGCGGUUGCCAU | 3583 | AUGGCAACCGCAGCAGCU | 4618 | | [1804-1821] 3′UTR |
| 1008 | CUGCAUCGUGGAAGCAUU | 3584 | AAUGCUUCCACGAUGCAG | 4619 | Rh | [2947-2964] 3′UTR |
| 1009 | UACUCCUGUUUCUGCUGA | 3585 | UCAGCAGAAACAGGAGUA | 4620 | | [2817-2834] 3′UTR |
| 1010 | CCUUGUAGAAAUGGGAGC | 3586 | GCUCCCAUUUCUACAAGG | 4621 | Rh | [1613-1630] 3′UTR |
| 1011 | AACCUAUGUGUUCCCUCA | 3587 | UGAGGGAACACAUAGGUU | 4622 | | [2275-2292] 3′UTR |
| 1012 | UAGUUUAAGAAGGCUCUC | 3588 | GAGAGCCUUCUUAAACUA | 4623 | | [3263-3280] 3′UTR |
| 1013 | UGCGCAUGUCUCUGAUGC | 3589 | GCAUCAGAGACAUGCGCA | 4624 | | [3576-3593] 3′UTR |
| 1014 | AGAGAAGUGACGGCUCCU | 3590 | AGGAGCCGUCACUUCUCU | 4625 | | [885-902] ORF |
| 1015 | CAAGGGUUUCGACUGGUC | 3591 | GACCAGUCGAAACCCUUG | 4626 | Rh | [1008-1025] 3′UTR |
| 1016 | UCUAAGCACAGCUCUCUU | 3592 | AAGAGAGCUGUGCUUAGA | 4627 | | [3312-3329] 3′UTR |
| 1017 | AUUUGAUCCACACACGUU | 3593 | AACGUGUGUGGAUCAAAU | 4628 | | [3134-3151] 3′UTR |
| 1018 | CUUCCCUCCCAGUCCCUG | 3594 | CAGGGACUGGGAGGGAAG | 4629 | | [1239-1256] 3′UTR |
| 1019 | AAGAAGGCUCUCCAUUUG | 3595 | CAAAUGGAGAGCCUUCUU | 4630 | | [3269-3286] 3′UTR |
| 1020 | CGGGUGGCAGCUGACAGA | 3596 | UCUGUCAGCUGCCACCCG | 4631 | | [3199-3216] 3′UTR |
| 1021 | UGGGAGCCUCCCUCUGAG | 3597 | CUCAGAGGGAGGCUCCCA | 4632 | Rh | [1595-1612] 3′UTR |
| 1022 | UAUACCAACUUCUGCUUG | 3598 | CAAGCAGAAGUUGGUAUA | 4633 | Rh | [2203-2220] 3′UTR |
| 1023 | UGGAUGGACUGGGUCACA | 3599 | UGUGACCCAGUCCAUCCA | 4634 | Rh, Rt, Ms, Pg | [821-838] ORF |
| 1024 | CAGAGUGGAACGCGUGGC | 3600 | GCCACGCGUUCCACUCUG | 4635 | | [2970-2987] 3′UTR |
| 1025 | UCUCUUGUUUCCUCCCAC | 3601 | GUGGGAGGAAACAAGAGA | 4636 | | [2363-2380] 3′UTR |
| 1026 | CACCAUGAGCUCCCAGCA | 3602 | UGCUGGGAGCUCAUGGUG | 4637 | | [1487-1504] 3′UTR |
| 1027 | AUCUGCACAUCCUGAGGA | 3603 | UCCUCAGGAUGUGCAGAU | 4638 | Rh | [1914-1931] 3′UTR |
| 1028 | CCCUUGUUUUCUGCAGCU | 3604 | AGCUGCAGAAAACAAGGG | 4639 | Rh | [1416-1433] 3′UTR |
| 1029 | CCCUUCCUGGAAACAGCA | 3605 | UGCUGUUUCCAGGAAGGG | 4640 | Rh, Rb, Rt, Ms | [1038-1055] 3′UTR |
| 1030 | ACCAUGAGCUCCCAGCAC | 3606 | GUGCUGGGAGCUCAUGGU | 4641 | | [1488-1505] 3′UTR |
| 1031 | CACACGUUGGUCUUUUAA | 3607 | UUAAAAGACCAACGUGUG | 4642 | | [3144-3161] 3′UTR |
| 1032 | CUGAGUCUUUUUGGUCUG | 3608 | CAGACCAAAAAGACUCAG | 4643 | | [1665-1682] 3′UTR |
| 1033 | CCCUCCCAGUCCCUGCCU | 3609 | AGGCAGGGACUGGGAGGG | 4644 | Rh | [1242-1259] 3′UTR |
| 1034 | UCAGCCUCCAGGACACUA | 3610 | UAGUGUCCUGGAGGCUGA | 4645 | | [2113-2130] 3′UTR |
| 1035 | UGCUUUAUCCGGGCUUGU | 3611 | ACAAGCCCGGAUAAAGCA | 4646 | | [1872-1889] 3′UTR |

TABLE B6
18 -mer siTIMP2 Cross-Species

| | | SEQ | | SEQ | | |
|---|---|---|---|---|---|---|
| | | ID | | ID | | human-73858577 |
| No. | Sense (5′ > 3′) | NO: | Antisense (5′ > 3′) | NO: | Other Sp | ORF: 303-965 |
| 1 | ACCAGAUGGGCUGCGAGU | 4647 | ACUCGCAGCCCAUCUGGU | 4707 | Rh, Ck, Rb, Rt | [744-761] ORF |
| 2 | ACAGGUACCAGAUGGGCU | 4648 | AGCCCAUCUGGUACCUGU | 4708 | Rh, Rb, Cw, Rt, Ms, Pg | [738-755] ORF |
| 3 | GAAGAGCCUGAACCACAG | 4649 | CUGUGGUUCAGGCUCUUC | 4709 | Rh, Rb, Cw, Ms, Pg | [724-741] ORF |
| 4 | UCUUCGCCUGCAUCAAGA | 4650 | UCUUGAUGCAGGCGAAGA | 4710 | Rh, Rb, Cw, Dg, Ms | [870-887] ORF |
| 5 | CGGGCACCAGGCCAAGUU | 4651 | AACUUGGCCUGGUGCCCG | 4711 | Rh, Rb, Rt, Ms | [853-870] ORF |
| 6 | CGCUCGGCCUCCUGCUGC | 4652 | GCAGCAGGAGGCCGAGCG | 4712 | Dg, Rt, Ms | [333-350] ORF |
| 7 | CAUCCCUUCCUGGAAACA | 4653 | UGUUUCCAGGAAGGGAUG | 4713 | Rh, Rb, Rt, Ms | [1035-1052] 3′UTR |
| 8 | CACCCGCAACAGGCGUUU | 4654 | AAACGCCUGUUGCGGGUG | 4714 | Cw, Rt, Ms | [398-415] ORF |
| 9 | GGCCGACGCCUGCAGCUG | 4655 | CAGCUGCAGGCGUCGGCC | 4715 | Cw, Dg, Rt, Ms | [370-387] ORF |
| 10 | GUGCCUCUGGAUGGACUG | 4656 | CAGUCCAUCCAGAGGCAC | 4716 | Rh, Rb, Cw, Dg, Rt, Ms | [814-831] ORF |
| 11 | CCUGAACCACAGGUACCA | 4657 | UGGUACCUGUGGUUCAGG | 4717 | Rh, Rb, Cw, Ms, Pg | [730-747] ORF |
| 12 | UCCUGGAAACAGCAUGAA | 4658 | UUCAUGCUGUUUCCAGGA | 4718 | Rh, Rb, Rt, Ms | [1042-1059] 3′UTR |
| 13 | GUCUCGCUGGACGUUGGA | 4659 | UCCAACGUCCAGCGAGAC | 4719 | Rt, Ms | [599-616] ORF |
| 14 | GCCGACGCCUGCAGCUGC | 4660 | GCAGCUGCAGGCGUCGGC | 4720 | Cw, Dg, Rt, Ms | [371-388] ORF |
| 15 | AACCACAGGUACCAGAUG | 4661 | CAUCUGGUACCUGUGGUU | 4721 | Rh, Rb, Cw, Rt, Ms, Pg | [734-751] ORF |
| 16 | CCCGGUGCACCCGCAACA | 4662 | UGUUGCGGGUGCACCGGG | 4722 | Cw, Dg, Rt, Ms | [391-408] ORF |
| 17 | CACAGGUACCAGAUGGGC | 4663 | GCCCAUCUGGUACCUGUG | 4723 | Rh, Rb, Cw, Rt, Ms, Pg | [737-754] ORF |
| 18 | CCCGCAACAGGCGUUUUG | 4664 | CAAAACGCCUGUUGCGGG | 4724 | Cw, Rt, Ms | [400-417] ORF |
| 19 | UCAAGCAGAUAAAGAUGU | 4665 | ACAUCUUUAUCUGCUUGA | 4725 | Cw, Dg, Rt, Ms, Pg | [519-536] ORF |
| 20 | CACCAGGCCAAGUUCUUC | 4666 | GAAGAACUUGGCCUGGUG | 4726 | Rh, Rb, Cw, Ms | [857-874] ORF |
| 21 | ACCACAGGUACCAGAUGG | 4667 | CCAUCUGGUACCUGUGGU | 4727 | Rh, Rb, Cw, Rt, Ms, Pg | [735-752] ORF |
| 22 | UCUCGCUGGACGUUGGAG | 4668 | CUCCAACGUCCAGCGAGA | 4728 | Rt, Ms | [600-617] ORF |
| 23 | CAAGCAGAUAAAGAUGUU | 4669 | AACAUCUUUAUCUGCUUG | 4729 | Cw, Dg, Rt, Ms, Pg | [520-537] ORF |
| 24 | GAUAAAGAUGUUCAAAGG | 4670 | CCUUUGAACAUCUUUAUC | 4730 | Dg, Rt, Ms | [526-543] ORF |
| 25 | GCACCCGCAACAGGCGUU | 4671 | AACGCCUGUUGCGGGUGC | 4731 | Cw, Dg, Rt, Ms | [397-414] ORF |
| 26 | CAGGCCAAGUUCUUCGCC | 4672 | GGCGAAGAACUUGGCCUG | 4732 | Rh, Rb, Cw, Dg, Ms | [860-877] ORF |
| 27 | UGCACCCGCAACAGGCGU | 4673 | ACGCCUGUUGCGGGUGCA | 4733 | Cw, Dg, Rt, Ms | [396-413] ORF |
| 28 | CAGGUACCAGAUGGGCUG | 4674 | CAGCCCAUCUGGUACCUG | 4734 | Rh, Rb, Cw, Dg, Rt, Ms, Pg | [739-756] ORF |
| 29 | GCUGGCGCUCGGCCUCCU | 4675 | AGGAGGCCGAGCGCCAGC | 4735 | Dg, Rt, Ms | [328-345] ORF |
| 30 | GCGCUCGGCCUCCUGCUG | 4676 | CAGCAGGAGGCCGAGCGC | 4736 | Dg, Rt, Ms | [332-349] ORF |
| 31 | GACGCCUGCAGCUGCUCC | 4677 | GGAGCAGCUGCAGGCGUC | 4737 | Cw, Dg, Rt, Ms | [374-391] ORF |
| 32 | UACCAGAUGGGCUGCGAG | 4678 | CUCGCAGCCCAUCUGGUA | 4738 | Rh, Ck, Rb, Rt | [743-760] ORF |
| 33 | GCUCGGCCUCCUGCUGCU | 4679 | AGCAGCAGGAGGCCGAGC | 4739 | Dg, Rt, Ms | [334-351] ORF |
| 34 | CGGUGCACCCGCAACAGG | 4680 | CCUGUUGCGGGUGCACCG | 4740 | Cw, Dg, Rt, Ms | [393-410] ORF |
| 35 | CCGGUGCACCCGCAACAG | 4681 | CUGUUGCGGGUGCACCGG | 4741 | Cw, Dg, Rt, Ms | [392-409] ORF |
| 36 | ACCCGCAACAGGCGUUUU | 4682 | AAAACGCCUGUUGCGGGU | 4742 | Cw, Rt, Ms | [399-416] ORF |
| 37 | AUCAAGCAGAUAAAGAUG | 4683 | CAUCUUUAUCUGCUUGAU | 4743 | Cw, Dg, Rt, Ms, Pg | [518-535] ORF |
| 38 | CCACAGGUACCAGAUGGG | 4684 | CCCAUCUGGUACCUGUGG | 4744 | Rh, Rb, Cw, Rt, Ms, Pg | [736-753] ORF |
| 39 | CCGACGCCUGCAGCUGCU | 4685 | AGCAGCUGCAGGCGUCGG | 4745 | Cw, Dg, Rt, Ms | [372-389] ORF |
| 40 | CUUCAUCGUGCCCUGGGA | 4686 | UCCCAGGGCACGAUGAAG | 4746 | Rh, Rb, Cw, Dg, Pg | [685-702] ORF |
| 41 | CGGCCGACGCCUGCAGCU | 4687 | AGCUGCAGGCGUCGGCCG | 4747 | Cw, Dg, Rt, Ms | [369-386] ORF |
| 42 | GUGCACCCGCAACAGGCG | 4688 | CGCCUGUUGCGGGUGCAC | 4748 | Cw, Dg, Rt, Ms | [395-412] ORF |
| 43 | CGACGCCUGCAGCUGCUC | 4689 | GAGCAGCUGCAGGCGUCG | 4749 | Cw, Dg, Rt, Ms | [373-390] ORF |
| 44 | ACCAGGCCAAGUUCUUCG | 4690 | CGAAGAACUUGGCCUGGU | 4750 | Rh, Rb, Cw, Ms | [858-875] ORF |
| 45 | UGCCUCUGGAUGGACUGG | 4691 | CCAGUCCAUCCAGAGGCA | 4751 | Rh, Rb, Cw, Dg, Rt, Ms | [815-832] ORF |
| 46 | AACAGGCGUUUUGCAAUG | 4692 | CAUUGCAAAACGCCUGUU | 4752 | Cw, Rt, Ms | [405-422] ORF |
| 47 | CUCGGCCUCCUGCUGCUG | 4693 | CAGCAGCAGGAGGCCGAG | 4753 | Dg, Rt | [335-352] ORF |
| 48 | CGGCCUCCUGCUGCUGGC | 4694 | GCCAGCAGCAGGAGGCCG | 4754 | Dg, Rt | [337-354] ORF |
| 49 | CCAGGCCAAGUUCUUCGC | 4695 | GCGAAGAACUUGGCCUGG | 4755 | Rh, Rb, Cw, Dg, Ms | [859-876] ORF |
| 50 | CUGGCGCUCGGCCUCCUG | 4696 | CAGGAGGCCGAGCGCCAG | 4756 | Dg, Rt, Ms | [329-346] ORF |
| 51 | UCGGCCUCCUGCUGCUGG | 4697 | CCAGCAGCAGGAGGCCGA | 4757 | Dg, Rt | [336-353] ORF |
| 52 | UGGCGCUCGGCCUCCUGC | 4698 | GCAGGAGGCCGAGCGCCA | 4758 | Dg, Rt, Ms | [330-347] ORF |
| 53 | AGGUACCAGAUGGGCUGC | 4699 | GCAGCCCAUCUGGUACCU | 4759 | Rh, Ck, Rb, Rt | [740-757] ORF |
| 54 | CUGUGACUUCAUCGUGCC | 4700 | GGCACGAUGAAGUCACAG | 4760 | Rh, Rb, Cw, Dg, Pg | [679-696] ORF |
| 55 | GACUUCAUCGUGCCCUGG | 4701 | CCAGGGCACGAUGAAGUC | 4761 | Rh, Rb, Cw, Dg, Pg | [683-700] ORF |
| 56 | ACGCCUGCAGCUGCUCCC | 4702 | GGGAGCAGCUGCAGGCGU | 4762 | Cw, Dg, Rt, Ms | [375-392] ORF |
| 57 | AAGAGCCUGAACCACAGG | 4703 | CCUGUGGUUCAGGCUCUU | 4763 | Rh, Rb, Cw, Ms, Pg | [725-742] ORF |
| 58 | CAGGGCCAAAGCGGUCAG | 4704 | CUGACCGCUUUGGCCCUG | 4764 | Rb, Dg | [436-453] ORF |
| 59 | UGACUUCAUCGUGCCCUG | 4705 | CAGGGCACGAUGAAGUCA | 4765 | Rh, Rb, Cw, Dg, Pg | [682-699] ORF |
| 60 | UGUGACUUCAUCGUGCCC | 4706 | GGGCACGAUGAAGUCACA | 4766 | Rh, Rb, Cw, Dg, Pg | [680-697] ORF |

TABLE B7
Preferred 18 + 1 -mer siTIMP2

| | | SEQ | | SEQ | | |
|---|---|---|---|---|---|---|
| | | ID | | ID | | |
| SiTIMP2_p# | Sense (5′ > 3′) | NO: | Antisense (5′ > 3′) | NO: | Length | Position |
| siTIMP2_p1 | GGAGGAAAGAAGGAAUAUA | 4767 | UAUAUUCCUUCUUUCCUCC | 4815 | 18 + 1 | [614-631] ORF |
| siTIMP2_p2 | GGACGUUGGAGGAAAGAAA | 4768 | UUUCUUUCCUCCAACGUCC | 4816 | 18 + 1 | [607-624] ORF |
| siTIMP2-p3 | GGGUCUCGCUGGACGUUGA | 4769 | UCAACGUCCAGCGAGACCC | 4817 | 18 + 1 | [597-614] ORF |
| siTIMP2_p5 | GGACUGGGUCACAGAGAAA | 4770 | UUUCUCUGUGACCCAGUCC | 4818 | 18 + 1 | [826-843] ORF |
| siTIMP2_p6 | CUGCAUCAAGAGAAGUGAA | 4771 | UUCACUUCUCUUGAUGCAG | 4819 | 18 + 1 | [877-894] ORF |
| siTIMP2_p7 | GAGGAAAGAAGGAAUAUCA | 4772 | UGAUAUUCCUUCUUUCCUC | 4820 | 18 + 1 | [615-632] ORF |
| siTIMP2_p8 | GCUGGACGUUGGAGGAAAA | 4773 | UUUUCCUCCAACGUCCAGC | 4821 | 18 + 1 | [604-621] ORF |
| siTIMP2_p9 | GGCGUUUUGCAAUGCAGAA | 4774 | UUCUGCAUUGCAAAACGCC | 4822 | 18 + 1 | [409-426] ORF |
| siTIMP2_p10 | GCCUGCAUCAAGAGAAGUA | 4775 | UACUUCUCUUGAUGCAGGC | 4823 | 18 + 1 | [875-892] ORF |
| siTIMP2_p11 | AGGAAAGAAGGAAUAUCUA | 4776 | UAGAUAUUCCUUCUUUCCU | 4824 | 18 + 1 | [616-633] ORF |
| siTIMP2_p12 | AGAUCAAGCAGAUAAAGAA | 4777 | UUCUUUAUCUGCUUGAUCU | 4825 | 18 + 1 | [516-533] ORF |
| siTIMP2_p13 | GUUGGAGGAAAGAAGGAAA | 4778 | UUUCCUUCUUUCCUCCAAC | 4826 | 18 + 1 | [611-628] ORF |
| siTIMP2_p14 | GCUGCGAGUGCAAGAUCAA | 4779 | UUGAUCUUGCACUCGCAGC | 4827 | 18 + 1 | [753-770] ORF |
| siTIMP2_p15 | GGGCUGCGAGUGCAAGAUA | 4780 | UAUCUUGCACUCGCAGCCC | 4828 | 18 + 1 | [751-768] ORF |
| siTIMP2_p19 | GACAUCCCUUCCUGGAAAA | 4781 | UUUUCCAGGAAGGGAUGUC | 4829 | 18 + 1 | [1033-1050] 3′UTR |
| siTIMP2-p21 | GAUGGACUGGGUCACAGAA | 4782 | UUCUGUGACCCAGUCCAUC | 4830 | 18 + 1 | [823-840] ORF |
| siTIMP2_p22 | GCCUCUGGAUGGACUGGGA | 4783 | UCCCAGUCCAUCCAGAGGC | 4831 | 18 + 1 | [816-833] ORF |
| siTIMP2_p23 | GAGUGCCUCUGGAUGGACA | 4784 | UGUCCAUCCAGAGGCACUC | 4832 | 18 + 1 | [812-829] ORF |
| siTIMP2_p26 | GGCACCAGGCCAAGUUCUA | 4785 | UAGAACUUGGCCUGGUGCC | 4833 | 18 + 1 | [855-872] ORF |
| siTIMP2_p28 | GCAACAGGCGUUUUGCAAA | 4786 | UUUGCAAAACGCCUGUUGC | 4834 | 18 + 1 | [403-420] ORF |
| siTIMP2_p31 | GACGUUGGAGGAAAGAAGA | 4787 | UCUUCUUUCCUCCAACGUC | 4835 | 18 + 1 | [608-625] ORF |
| siTIMP2_p32 | GAUCAAGCAGAUAAAGAUA | 4788 | UAUCUUUAUCUGCUUGAUC | 4836 | 18 + 1 | [517-534] ORF |
| siTIMP2_p34 | UGAGAUCAAGCAGAUAAAA | 4789 | UUUUAUCUGCUUGAUCUCA | 4837 | 18 + 1 | [514-531] ORF |
| siTIMP2_p36 | UGUGCAUUUUGCAGAAACA | 4790 | UGUUUCUGCAAAAUGCACA | 4838 | 18 + 1 | [1331-1348] 3′UTR |
| siTIMP2_p42 | GAACCACAGGUACCAGAUA | 4791 | UAUCUGGUACCUGUGGUUC | 4839 | 18 + 1 | [733-750] ORF |
| siTIMP2_p43 | CACCCAGAAGAAGAGCCUA | 4792 | UAGGCUCUUCUUCUGGGUG | 4840 | 18 + 1 | [715-732] ORF |
| siTIMP2_p45 | CCUUCCUGGAAACAGCAUA | 4793 | UAUGCUGUUUCCAGGAAGG | 4841 | 18 + 1 | [1039-1056] 3′UTR |
| siTIMP2_p47 | UGGGCUGCGAGUGCAAGAA | 4794 | UUCUUGCACUCGCAGCCCA | 4842 | 18 + 1 | [750-767] ORF |
| siTIMP2_p48 | GAUGGGCUGCGAGUGCAAA | 4795 | UUUGCACUCGCAGCCCAUC | 4843 | 18 + 1 | [748-765] ORF |
| siTIMP2_p49 | AUCCCUUCCUGGAAACAGA | 4796 | UCUGUUUCCAGGAAGGGAU | 4844 | 18 + 1 | [1036-1053] 3′UTR |
| siTIMP2_p50 | AGUGCCUCUGGAUGGACUA | 4797 | UAGUCCAUCCAGAGGCACU | 4845 | 18 + 1 | [813-830] ORF |
| siTIMP2_p52 | UGGAGGAAAGAAGGAAUAA | 4798 | UUAUUCCUUCUUUCCUCCA | 4846 | 18 + 1 | [613-630] ORF |
| siTIMP2_p53 | GGGCACCAGGCCAAGUUCA | 4799 | UGAACUUGGCCUGGUGCCC | 4847 | 18 + 1 | [854-871] ORF |
| siTIMP2_p54 | GUGCAUUUUGCAGAAACUA | 4800 | UAGUUUCUGCAAAAUGCAC | 4848 | 18 + 1 | [1332-1349] 3′UTR |
| siTIMP2_p56 | CCAGAUGGGCUGCGAGUGA | 4801 | UCACUCGCAGCCCAUCUGG | 4849 | 18 + 1 | [745-762] ORF |
| siTIMP2_p57 | CGAGUGCCUCUGGAUGGAA | 4802 | UUCCAUCCAGAGGCACUCG | 4850 | 18 + 1 | [811-828] ORF |
| siTIMP2_p58 | CUGCGAGUGCAAGAUCACA | 4803 | UGUGAUCUUGCACUCGCAG | 4851 | 18 + 1 | [754-771] ORF |
| siTIMP2_p59 | UCUGGAUGGACUGGGUCAA | 4804 | UUGACCCAGUCCAUCCAGA | 4852 | 18 + 1 | [819-836] ORF |
| siTIMP2_p60 | GUACCAGAUGGGCUGCGAA | 4805 | UUCGCAGCCCAUCUGGUAC | 4853 | 18 + 1 | [742-759] ORF |
| siTIMP2_p63 | GUAGUGAUCAGGGCCAAAA | 4806 | UUUUGGCCCUGAUCACUAC | 4854 | 18 + 1 | [428-445] ORF |
| siTIMP2_p66 | GGCGCUCGGCCUCCUGCUA | 4807 | UAGCAGGAGGCCGAGCGCC | 4855 | 18 + 1 | [331-348] ORF |
| siTIMP2_p70 | UGGAUGGACUGGGUCACAA | 4808 | UUGUGACCCAGUCCAUCCA | 4856 | 18 + 1 | [821-838] ORF |
| siTIMP2_p72 | CCCUUCCUGGAAACAGCAA | 4809 | UUGCUGUUUCCAGGAAGGG | 4857 | 18 + 1 | [1038-1055] 3′UTR |
| siTIMP2_p73 | ACCAGAUGGGCUGCGAGUA | 4810 | UACUCGCAGCCCAUCUGGU | 4858 | 18 + 1 | [744-761] ORF |
| siTIMP2_p74 | ACAGGUACCAGAUGGGCUA | 4811 | UAGCCCAUCUGGUACCUGU | 4859 | 18 + 1 | [738-755] ORF |
| siTIMP2_p77 | CGGGCACCAGGCCAAGUUA | 4812 | UAACUUGGCCUGGUGCCCG | 4860 | 18 + 1 | [853-870] ORF |
| siTIMP2_p80 | CAUCCCUUCCUGGAAACAA | 4813 | UUGUUUCCAGGAAGGGAUG | 4861 | 18 + 1 | [1035-1052] 3′UTR |
| siTIMP2_p81 | CACCCGCAACAGGCGUUUA | 4814 | UAAACGCCUGUUGCGGGUG | 4862 | 18 + 1 | [398-415] ORF |

TABLE B8
18 + 1 -mer siTIMP2 with lowest predicted OT effect

| | | | SEQ | | SEQ | |
|---|---|---|---|---|---|---|
| Cross | | | ID | | ID | No. in |
| species: | Ranking | Sense (5′ > 3′) | NO: | Antisense (5′ > 3′) | NO: | Table B7 |
| H/Rt | 3 | CUGCAUCAAGAGAAGUGAA | 4771 | UUCACUUCUCUUGAUGCAG | 4819 | siTIMP2_p6 |
| H/Rt | 3 | GGCGUUUUGCAAUGCAGAA | 4774 | UUCUGCAUUGCAAAACGCC | 4822 | siTIMP2_p9 |
| H/Rt | 4 | GGGCUGCGAGUGCAAGAUA | 4780 | UUCUGCAUUGCAAAACGCC | 4828 | siTIMP2_p15 |
| H/Rt | 4 | GACAUCCCUUCCUGGAAAA | 4781 | UUCUGCAUUGCAAAACGCC | 4829 | siTIMP2_p19 |
| H/Rt | 4 | GAUGGACUGGGUCACAGAA | 4782 | UUCUGCAUUGCAAAACGCC | 4830 | siTIMP2_p21 |
| H/Rt | 4 | GCCUCUGGAUGGACUGGGA | 4783 | UUCUGCAUUGCAAAACGCC | 4831 | siTIMP2_p22 |
| H/Rt | 4 | GAGUGCCUCUGGAUGGACA | 4784 | UUCUGCAUUGCAAAACGCC | 4832 | siTIMP2_p23 |
| H/Rt | 2 | GCAACAGGCGUUUUGCAAA | 4786 | UUUGCAAAACGCCUGUUGC | 4834 | siTIMP2_p28 |
| H/Rt | 3 | GACGUUGGAGGAAAGAAGA | 4787 | UCUUCUUUCCUCCAACGUC | 4835 | siTIMP2_p31 |
| H/Rt | 4 | UGUGCAUUUUGCAGAAACA | 4790 | UGUUUCUGCAAAAUGCACA | 4838 | siTIMP2_p36 |
| H/Rt | 4 | GAACCACAGGUACCAGAUA | 4791 | UAUCUGGUACCUGUGGUUC | 4839 | siTIMP2_p42 |
| H/Rt | 4 | UGGGCUGCGAGUGCAAGAA | 4794 | UUCUUGCACUCGCAGCCCA | 4842 | siTIMP2_p47 |
| H/Rt | 4 | AGUGCCUCUGGAUGGACUA | 4797 | UAGUCCAUCCAGAGGCACU | 4845 | siTIMP2_p50 |
| H/Rt | 4 | CCAGAUGGGCUGCGAGUGA | 4801 | UCACUCGCAGCCCAUCUGG | 4849 | siTIMP2_p56 |
| H/Rt | 4 | CGAGUGCCUCUGGAUGGAA | 4802 | UUCCAUCCAGAGGCACUCG | 4850 | siTIMP2_p57 |
| H/Rt | 2 | CUGCGAGUGCAAGAUCACA | 4803 | UGUGAUCUUGCACUCGCAG | 4851 | siTIMP2_p58 |
| H/Rt | 3 | GUACCAGAUGGGCUGCGAA | 4805 | UUCGCAGCCCAUCUGGUAC | 4853 | siTIMP2_p60 |
| H/Rt | 2 | GUAGUGAUCAGGGCCAAAA | 4806 | UUUUGGCCCUGAUCACUAC | 4854 | siTIMP2_p63 |
| H/Rt | 3 | UGGAUGGACUGGGUCACAA | 4808 | UUGUGACCCAGUCCAUCCA | 4856 | siTIMP2_p70 |
| H/Rt | 4 | ACCAGAUGGGCUGCGAGUA | 4810 | UACUCGCAGCCCAUCUGGU | 4858 | siTIMP2_p73 |
| H/Rt | 4 | ACAGGUACCAGAUGGGCUA | 4811 | UAGCCCAUCUGGUACCUGU | 4859 | siTIMP2_p74 |
| H/Rt | 2 | CACCCGCAACAGGCGUUUA | 4814 | UAAACGCCUGUUGCGGGUG | 4862 | siTIMP2_p81 |

### Example 6

### In Vitro Testing of the siRNA Compounds for the Target Genes

[0445] Low-Throughput-Screen (LTS) for siRNA oligos directed to human and rat TIMP1 and TIMP2 gene.

[0446] About 2×10⁵ human cell lines (HeLa, LX2, hHSC or PC3) endogenously expressing TIMP1 or TIMP2 gene, are inoculated in 1.5 mL growth medium in order to reach 30-50% confluence after 24 hours. Cells are transfected with Lipofectamine-2000® reagent to a final concentration of 0.01-5 nM per transfected cells. Cells aere incubated at 37±1° C., 5% CO₂ for 48 hours. siRNA transfected cells are harvested and RNA is isolated using EZ-RNA® kit [Biological Industries (#20-410-100)].

[0447] Reverse transcription is performed as follows: Synthesis of cDNA is performed and human TIMP1 and TIMP2 mRNA levels are determined by Real Time qPCR and normalized to those of the Cyclophilin A (CYNA, PPIA) mRNA for each sample. siRNA activity is determined based on the ratio of the TIMP1 or TIMP2 mRNA quantity in siRNA-treated samples versus non-transfected control samples.

[0448] The most active sequences are selected from additional, assays.

IC50 Values for the LTS Selected TIMP1 or TIMP2 siRNA Oligos

[0449] Cells are grown as described above. The IC50 value of the tested RNAi activity is determined by constructing a dose-response curve using the activity results obtained with the various final siRNA concentrations. The dose response curve is constructed by plotting the relative amount of residual TIMP1 or TIMP2 mRNA versus the logarithm of transfected siRNA concentration. The curve is calculated by fitting the best sigmoid curve to the measured data. The method for the sigmoid fit is also known as a 3-point curve fit.

$$Y + Bot + \frac{100 - Bot}{1 + {10}^{( LogIC 50 - X ) \times HillSlope}}$$

where Y is the residual TIMP1 or TIMP2 mRNA response, X is the logarithm of transfected siRNA concentration, Bot is the Y value at the bottom plateau, LogIC50 is the X value when Y is halfway between bottom and top plateaus and HillSlope is the steepness of the curve.

[0450] The percent of inhibition of gene expression using specific siRNAs was determined using qPCR analysis of target gene in cells expressing the endogenous gene. Other siRNA compounds according to Tables A1, A2, A3, A4, A5, A6, A7, A8, B1, B2, B3, B4, B5, B6, B7, B8 (Tables A1-B8) are tested in vitro where it is shown that these siRNA compounds inhibit gene expression. Activity is shown as percent residual mRNA; accordingly, a lower value reflects better activity.

[0451] In order to test the stability of the siRNA compounds in serum, specific siRNA molecules are incubated in four different batches of human serum (100% concentration) at 37° C. for up to 24 hours. Samples are collected at 0.5, 1, 3, 6, 8, 10, 16 and 24 hours. The migration patterns as an indication of are determined at each collection time by polyacrylamide gel electrophoresis (PAGE).

### Example 7

### Validation of siTIMP1 and siTIMP2 Knock Down Effect at the Protein Level

[0452] The inhibitory effect of different siTIMP1 and siTIMP2 siNA molecules on TIMP1 and TIMP2 mRNA expression are validated at the protein level by measuring TIMP1 and TIMP2 in hTERT cells transfected with different siTIMP1 and siTIMP2. Transfection of hTERT cells with different siTIMP1 and siTIMP2 are performed as described above. Transfected hTERT cells are lysed and the cell lysate are clarified by centrifugation. Proteins in the clarified cell lysate are resolved by SDS polyacrylamide gel electrophoresis. The level of TIMP1 and TIMP2 protein in the cell lysate are determined using anti-TIMP or anti-TIMP2 antibodies as the primary antibody HRP conjugated antibodies (Millipore) as the secondary antibody, and subsequently detection by Supersignal West Pico Chemiluminescence kit (Pierce). Anti-actin antibody (Abcam) is used as a protein loading control.

### Example 8

### Downregulation of Collagen I Expression by siTIMP1 and siTIMP2 siRNA Duplexes

[0453] To determine the effect of siTIMP1 and siTIMP2, alone or in combination on collagen I expression level, collagen I mRNA level in hTERT cells treated with different siTIMP1 and or siTIMP2. Briefly, hTERT cells are transfected with different siTIMP1, and or siTIMP2 as described in Example 2. The cells are lysed after 72 hours and mRNA were isolated using RNeasy mini kit according to the manual (Qiagen). The level of collagen 1 mRNA is determined by reverse transcription coupled with quantitative PCR using TaqMan® probes. Briefly, cDNA synthesis is carried out using High-Capacity cDNA Reverse Transcription Kit (ABI) according to the manual, and subjected to TaqMan Gene Expression Assay (ABI, COL1A1 assay ID Hs01076780_g1). The level of collagen I mRNA is normalized to the level of GAPDH mRNA according to the manufacturer's instruction (ABI). The signals are normalized to the signal obtained from cells transfected with scrambled siNA.

### Example 9

### Immunofluorescence Staining of siTIMP1 and or siTIMP2 treated hTERT Cells

[0454] To visualize the expression of two fibrosis markers, collagen I and alpha-smooth muscle actin (SMA), in hTERT cells transfected, the cells are stained with rabbit anti-collagen I antibody (Abcam) and mouse anti-alpha-SMA antibody (Sigma). Alexa Fluor 594 goat anti-mouse IgG and Alexa Fluor 488 goat anti-rabbit IgG (Invitrogen (Molecular Probes)) are used as secondary antibodies to visualize collagen I (green) and alpha-SMA (red). Hoescht is used to visualize nuleus (blue).

### Example 10

### Animal Models: Model Systems of Fibrotic Conditions

[0455] siRNAs provided herein may be tested in predictive animal models. Rat diabetic and aging models of kidney fibrosis include Zucker diabetic fatty (ZDF) rats, aged fa/fa (obese Zucker) rats, aged Sprague-Dawley (SD) rats, and Goto Kakizaki (GK) rats; GK rats are an inbred strain derived from Wistar rats, selected for spontaneous development of NIDDM (diabetes type II). Induced models of kidney fibrosis include the permanent unilateral ureteral obstruction (UUO) model which is a model of acute interstitial fibrosis occurring in healthy non-diabetic animals; renal fibrosis develops within days following the obstruction. Another induced model of kidney fibrosis is 5/6 nephrectomy model.

[0456] Two models of liver fibrosis in rats are the Bile Duct Ligation (BDL) with sham operation as controls, and CCl4 poisoning, with olive oil fed animals as controls, as described in the following references: Lotersztajn S, et al Hepatic Fibrosis: Molecular Mechanisms and Drug Targets. Annu Rev Pharmacol Toxicol. 2004 Oct. 7; Uchio K, et al., Down-regulation of connective tissue growth factor and type I collagen mRNA expression by connective tissue growth factor antisense oligonucleotide during experimental liver fibrosis. Wound Repair Regen. 2004 January-February; 12(1):60-6; Xu X Q, et al., Molecular classification of liver cirrhosis in a rat model by proteomics and bioinformatics Proteomics. 2004 October; 4(10):3235-45.

[0457] Models for ocular scarring are well known in the art e.g. Sherwood M B et al., J Glaucoma. 2004 October; 13(5):407-12. A new model of glaucoma filtering surgery in the rat; Miller M H et al., Ophthalmic Surg. 1989 May; 20(5):350-7. Wound healing in an animal model of glaucoma fistulizing surgery in the Rb; vanBockxmeer F M et al., Retina. 1985 Fall-Winter; 5(4): 239-52. Models for assessing scar tissue inhibitors; Wiedemann P et al., J Pharmacol Methods. 1984 August; 12(1): 69-78. Proliferative vitreoretinopathy: the Rb cell injection model for screening of antiproliferative drugs.

[0458] Models of cataract are described in the following publications: The role of Src family kinases in cortical cataract formation. Zhou J, Menko A S. Invest Ophthalmol V is Sci. 2002 July; 43(7):2293-300; Bioavailability and anticataract effects of a topical ocular drug delivery system containing disulfuram and hydroxypropyl-beta-cyclodextrin on selenite-treated rats. Wang S, et al. Curr Eye Res. 2004 July; 29(1):51-8; and Long-term organ culture system to study the effects of UV-A irradiation on lens transglutaminase. Weinreb O, Dovrat A.; Curr Eye Res. 2004 July; 29(1):51-8.

[0459] The compounds disclosed herein are tested in these models of fibrotic conditions, in which it is found that they are effective in treating liver fibrosis and other fibrotic conditions. The compounds as described herein are tested in this animal model and the results show that these siRNA compounds are useful in treating and/or preventing ischemia reperfusion injury following lung transplantation.

[0460] The contents of the articles, patents, and patent applications, and all other documents and electronically available information mentioned or cited herein, are hereby incorporated by reference in their entirety to the same extent as if each individual publication was specifically and individually indicated to be incorporated by reference.

[0461] Applicants reserve the right to physically incorporate into this application any and all materials and information from any such articles, patents, patent applications, or other physical and electronic documents.

[0462] It will be readily apparent to one skilled in the art that varying substitutions and modifications can be made to the invention disclosed herein without departing from the scope and spirit of the invention. Thus, such additional embodiments are within the scope of the present invention and the following claims. The present disclosure teaches one skilled in the art to test various combinations and/or substitutions of chemical modifications described herein toward generating nucleic acid constructs with improved activity for mediating RNAi activity. Such improved activity can include improved stability, improved bioavailability, and/or improved activation of cellular responses mediating RNAi. Therefore, the specific embodiments described herein are not limiting and one skilled in the art can readily appreciate that specific combinations of the modifications described herein can be tested without undue experimentation toward identifying nucleic acid molecules with improved RNAi activity.

[0463] The inventions illustratively described herein may suitably be practiced in the absence of any element or elements, limitation or limitations, not specifically disclosed herein. Thus, for example, the terms “a” and “an” and “the” and similar referents in the context of describing the invention (especially in the context of the following claims) are to be construed to cover both the singular and the plural, unless otherwise indicated herein or clearly contradicted by context. The terms “comprising”, “having,” “including,” containing”, etc. shall be read expansively and without limitation (e.g., meaning “including, but not limited to,”). Recitation of ranges of values herein are merely intended to serve as a shorthand method of referring individually to each separate value falling within the range, unless otherwise indicated herein, and each separate value is incorporated into the specification as if it were individually recited herein. All methods described herein can be performed in any suitable order unless otherwise indicated herein or otherwise clearly contradicted by context. The use of any and all examples, or exemplary language (e.g., “such as”) provided herein, is intended merely to better illuminate the invention and does not pose a limitation on the scope of the invention unless otherwise claimed. No language in the specification should be construed as indicating any non-claimed element as essential to the practice of the invention. Additionally, the terms and expressions employed herein have been used as terms of description and not of limitation, and there is no intention in the use of such terms and expressions of excluding any equivalents of the features shown and described or portions thereof, but it is recognized that various modifications are possible within the scope of the invention claimed. Thus, it should be understood that although the present invention has been specifically disclosed by preferred embodiments and optional features, modification and variation of the inventions embodied therein herein disclosed may be resorted to by those skilled in the art, and that such modifications and variations are considered to be within the scope of this invention.

[0464] The invention has been described broadly and generically herein. Each of the narrower species and subgeneric groupings falling within the generic disclosure also form part of the invention. This includes the generic description of the invention with a proviso or negative limitation removing any subject matter from the genus, regardless of whether or not the excised material is specifically recited herein. Other embodiments are within the following claims. In addition, where features or aspects of the invention are described in terms of Markush groups, those skilled in the art will recognize that the invention is also thereby described in terms of any individual member or subgroup of members of the Markush group.

1. A nucleic acid molecule, wherein:
(a) the nucleic acid molecule comprises a sense strand and an antisense strand;
(b) each strand of the nucleic acid molecule is independently 15 to 49 nucleotides in length;
(c) a 15 to 49 nucleotide sequence of the antisense strand is complementary to a sequence of an mRNA encoding TIMP1 (SEQ ID NO:1) or TIMP2 (SEQ ID NO:2); and
(d) a 15 to 49 nucleotide sequence of the sense strand is complementary to the antisense strand thereby generating a duplex region and includes a 15 to 49 nucleotide sequence of an mRNA encoding TIMP1 (SEQ ID NO:1) or TIMP2 (SEQ ID NO:2).

2. The nucleic acid molecule of claim 1 wherein the sequence of the antisense strand is complementary to a sequence of an mRNA encoding human TIMP1 (SEQ ID NO:1), and wherein the antisense strand and the sense strand comprise a sequence pair selected from the group consisting of siTIMP1_p2 (SEQ ID NOS:267 and 299); siTIMP1_p6 (SEQ ID NOS:268 and 300); siTIMP1_p14 (SEQ ID NOS:269 and 301); siTIMP1_p16 (SEQ ID NOS:270 and 302); siTIMP1_p17 (SEQ ID NOS:271 and 303); siTIMP1_p19 (SEQ ID NOS:272 and 304); siTIMP1_p20 (SEQ ID NOS:273 and 305); siTIMP1_p21 (SEQ ID NOS:274 and 306); siTIMP1_p23 (SEQ ID NOS:275 and 307; siTIMP1_p29 (278 and 310); siTIMP1_p33 (280 and 312); siTIMP1_p38 (SEQ ID NOS:281 and 313); siTIMP1_p42 (282 and 314); siTIMP1_p43 (SEQ ID NOS:283 and 315); siTIMP1_p45 (284 and 316); siTIMP1_p60 (SEQ ID NOS:286 and 318); siTIMP1_p71 (SEQ ID NOS:287 and 319); siTIMP1_p73 (SEQ ID NOS:288 and 320); siTIMP1_p78 (290 and 322); siTIMP1_p79 (SEQ ID NOS:291 and 323); siTIMP1_p85 (SEQ ID NOS:292 and 324); siTIMP1_p89 (SEQ ID NOS:293 and 325); siTIMP1_p91 (SEQ ID NOS:294 and 326); siTIMP1_p96 (SEQ ID NOS:295 and 327); siTIMP1_p98 (SEQ ID NOS:296 and 328); siTIMP1_p99 (SEQ ID NOS:297 and 329) and siTIMP1_p108 (SEQ ID NOS:298 and 330).

3. The nucleic acid molecule of claim 1, wherein the sequence of the antisense strand is complementary to a sequence of an mRNA encoding human TIMP1, and wherein the sense strand and the antisense strand are selected from the sequence pairs shown in Table C set forth as TIMP1-A (SEQ ID NOS:5 and 6); TIMP1-B (SEQ ID NOS:7 and 8) and TIMP1-C (SEQ ID NO:9 and 10).

4. The nucleic acid molecule of claim 1, wherein the sequence of the antisense strand that is complementary to a sequence of an mRNA encoding human TIMP1 comprises a sequence complimentary to a sequence between nucleotides 300-400 of SEQ ID NO: 1, 355-373 of SEQ ID NO: 1, 600-750 of SEQ ID NO: 1, 620-638 of SEQ ID NO: 1 or 640-658 of SEQ ID NO: 1.

5. (canceled)

6. (canceled)

7. (canceled)

8. (canceled)

9. The nucleic acid molecule of claim 1, wherein the sequence of the antisense strand is complementary to a sequence of an mRNA encoding human TIMP2, and wherein the sense strand and the antisense strand are selected from the sequence pairs shown in Table D.

10. The nucleic acid molecule of claim 1, wherein the sequence of the antisense strand is complementary to a sequence of an mRNA encoding human TIMP2 and comprises a sequence complimentary to a sequence between nucleotides 400-500 of SEQ ID NO: 2, 500-600 of SEQ ID NO: 2, 600-700 of SEQ ID NO: 2, and 698-716 of SEQ ID NO: 2.

11. (canceled)

12. (canceled)

13. (canceled)

14. (canceled)

15. (canceled)

16. (canceled)

17. (canceled)

18. The nucleic acid molecule of claim 1, wherein the antisense strand and the sense strand are independently 17 to 49 nucleotides in length.

19. (canceled)

20. (canceled)

21. (canceled)

22. (canceled)

23. (canceled)

24. The nucleic acid molecule of claim 1, wherein the antisense strand and the sense strand are each 19 nucleotides in length.

25. (canceled)

26. (canceled)

27. (canceled)

28. (canceled)

29. (canceled)

30. (canceled)

31. (canceled)

32. The nucleic acid molecule of claim 1, wherein the duplex region is 19 nucleotides in length.

33. The nucleic acid molecule of claim 1, wherein the antisense strand and the sense strand are separate polynucleotide strands.

34. (canceled)

35. (canceled)

36. The nucleic acid molecule of claim 1, wherein the sense strand and the antisense strands are part of a single polynucleotide strand having both a sense region and an antisense region.

37. (canceled)

38. (canceled)

39. (canceled)

40. (canceled)

41. (canceled)

42. (canceled)

43. (canceled)

44. (canceled)

45. (canceled)

46. (canceled)

47. (canceled)

48. (canceled)

49. (canceled)

50. (canceled)

51. (canceled)

52. (canceled)

53. (canceled)

54. (canceled)

55. (canceled)

56. (canceled)

57. The nucleic acid molecule of claim 1, wherein the nucleic acid molecule comprises one or more modifications or modified nucleotides.

58. (canceled)

59. (canceled)

60. (canceled)

61. (canceled)

62. (canceled)

63. (canceled)

64. (canceled)

65. (canceled)

66. (canceled)

67. (canceled)

68. (canceled)

69. (canceled)

70. (canceled)

71. (canceled)

72. (canceled)

73. (canceled)

74. (canceled)

75. (canceled)

76. (canceled)

77. (canceled)

78. (canceled)

79. (canceled)

80. (canceled)

81. (canceled)

82. (canceled)

83. (canceled)

84. (canceled)

85. (canceled)

86. A method for treating an individual suffering from a disease associated with TIMP1 or TIMP2, wherein
(a) when the disease is associated with TIMP1, the method comprises administering to said individual a nucleic acid molecule of claim 1 comprising a sequence of the antisense strand complementary to a sequence of a mRNA encoding human TIMP1, in an amount sufficient to reduce expression of TIMP1; and
(b) when the disease is associated with TIMP2, the method comprises administering to said individual a nucleic acid molecule of claim 1—comprising a sequence of the antisense strand complementary to a sequence of a mRNA encoding human TIMP2, in an amount sufficient to reduce expression of TIMP2.

87. (canceled)

88. The method of claim 86, wherein said disease associated with TIMP1 or TIMP2 is fibrosis.

89. A composition comprising a nucleic acid molecule of any of claim 1-4, 9, 10, 24, 32, 33, 36, 57, 98, 99, 105, 125-128 or 133 and a pharmaceutically acceptable carrier.

90. (canceled)

91. (canceled)

92. (canceled)

93. (canceled)

94. (canceled)

95. (canceled)

96. (canceled)

97. (canceled)

98. A double stranded nucleic acid molecule having the structure (A 1):

| | | | |
|---|---|---|---|
| (A1) | 5′ | (N)-Z 3′ | (antisense strand) |
| | 3′ | Z′-(N′)y -z″ 5′ | (sense strand) |

wherein each of N and N′ is a ribonucleotide which may be unmodified or modified, or an unconventional moiety;
wherein each of (N)x and (N′)y is an oligonucleotide in which each consecutive N or N′ is joined to the next N or N′ by a covalent bond;
wherein each of Z and Z′ is independently present or absent, but if present is independently 1-5 consecutive nucleotides or unconventional moieties or a combination thereof covalently attached at the 3′ terminus of the strand in which it is present.
wherein z″ may be present or absent, but if present is a capping moiety covalently attached at the 5′ terminus of (N′)y;
wherein each of x and y is independently an integer from 18 to 40;
wherein the sequence of (N′)y has complementarity to the sequence of (N)x; and wherein (N)x comprises an antisense sequence to an mRNA set forth in SEQ ID NO:1 or SEQ ID NO:2.

99. The nucleic acid molecule of claim 98 having the structure (A1), wherein (N)x comprises an antisense sequence to an mRNA set forth in SEQ ID NO:1 and wherein (N)x comprises an antisense oligonucleotide present in any one of Tables A 1, A2, A3 or A4; or wherein (N)x comprises an antisense sequence to an mRNA set forth in SEQ ID NO:2 and wherein (N)x comprises an antisense oligonucleotide present in any one of Tables B1, B2, B3 or B4.

100. (canceled)

101. (canceled)

102. (canceled)

103. (canceled)

104. (canceled)

105. The nucleic acid molecule of claim 98, wherein x=y=19.

106. (canceled)

107. (canceled)

108. (canceled)

109. (canceled)

110. (canceled)

111. (canceled)

112. (canceled)

113. (canceled)

114. (canceled)

115. (canceled)

116. (canceled)

117. (canceled)

118. (canceled)

119. (canceled)

120. (canceled)

121. (canceled)

122. (canceled)

123. (canceled)

124. (canceled)

125. A double stranded nucleic acid molecule having a structure (A2) set forth below:

| | | | |
|---|---|---|---|
| (A2) | 5′ | N1-(N)x - Z 3′ | (antisense strand) |
| | 3′ | Z′-N2-(N′)y -z″ 5′ | (sense strand) |

wherein each of N2, N and N′ is independently an unmodified or modified ribonucleotide, or an unconventional moiety;
wherein each of (N)x and (N′)y is an oligonucleotide in which each consecutive N or N′ is joined to the adjacent N or N′ by a covalent bond;
wherein each of x and y is independently an integer from 17 to 39;
wherein the sequence of (N′)y has complementarity to the sequence of (N)x and (N)x has complementarity to a consecutive sequence in the mRNA set forth in SEQ ID NO:1 or SEQ ID NO:2;
wherein N1 is covalently bound to (N)x and is mismatched to the mRNA set forth in SEQ ID NO:1 or SEQ ID NO:2;
wherein N1 is a moiety selected from the group consisting of ribouridine, modified ribouridine deoxyribouridine, modified deoxyribouridine, riboadenine, modified riboadenine deoxyriboadenine, and modified deoxyriboadenine;
wherein z″ may be present or absent, but if present is a capping moiety covalently attached at the 5′ terminus of (N′)y; and
wherein each of Z and Z′ is independently present or absent, but if present is independently 1-5 consecutive nucleotides or unconventional moieties or a combination thereof covalently attached at the 3′ terminus of the strand in which it is present.

126. The nucleic acid molecule of claim 125 wherein x=y=18.

127. The nucleic acid molecule of claim 125, wherein (N)x comprises an antisense sequence to an mRNA set forth in SEQ ID NO:1 or SEQ ID NO:2.

128. The nucleic acid molecule of claim 127, having the structure (A2),
wherein (N)x comprises an antisense sequence to an mRNA set forth in SEQ ID NO:1, comprising an antisense oligonucleotide present in any one of Tables A5, A6, A7, A8; or
wherein (N)x comprises an antisense sequence to an mRNA set forth in SEQ ID NO:2, comprising an antisense oligonucleotide present in any one of Tables B5, B6, B7, or B8.

129. (canceled)

130. (canceled)

131. (canceled)

132. (canceled)

133. A nucleic acid molecule consisting of four ribonucleotide strands forming three siRNA duplexes having the general structure: [chemical structure]
wherein each of oligo A, oligo B, oligo C, oligo D, oligo E and oligo F represents at least 19 consecutive ribonucleotides, wherein from 19 to 40 of such consecutive ribonucleotides, in each of oligo A, B, C, D, E and F comprise a strand of a siRNA duplex, wherein each ribonucleotide may be modified or unmodified;
wherein strand 1 comprises oligo A which is either a sense portion or an antisense portion of a first siRNA duplex of the nucleic acid molecule, strand 2 comprises oligo B which is complementary to at least 19 nucleotides in oligo A, and oligo A and oligo B together form a first siRNA duplex that targets a first target mRNA;
wherein strand 1 further comprises oligo C which is either a sense portion or an antisense strand portion of a second siRNA duplex of the nucleic acid molecule, strand 3 comprises oligo D which is complementary to at least 19 nucleotides in oligo C and oligo C and oligo D together form a second siRNA duplex that targets a second target mRNA;
wherein strand 4 comprises oligo E which is either a sense portion or an antisense strand portion of a third siRNA duplex of the nucleic acid molecule, strand 2 further comprises oligo F which is complementary to at least 19 nucleotides in oligo E and oligo E and oligo F together form a third siRNA duplex that targets a third target mRNA;
wherein linker A is a moiety that covalently links oligo A and oligo C; linker B is a moiety that covalently links oligo B and oligo F, and linker A and linker B can be the same or different; and
wherein the nucleic acid molecule includes at least one antisense strand and sense strand pair set forth in any one of Tables A1-A8 and Tables B1-B8.

134. (canceled)

135. (canceled)

136. (canceled)

137. (canceled)

138. (canceled)

139. (canceled)

140. (canceled)

141. (canceled)

142. (canceled)

143. (canceled)

144. (canceled)

145. (canceled)

The application's sequence listing, which the Patent Office published only in electronic form, follows.

SEQUENCE LISTING (4862 sequences)

SEQ ID NO: 1 - RNA, 931 nt, Homo sapiens
uuucgucggcccgccccuuggcuucugcacugaugguggguggaugaguaaugcauccaggaagccuggaggccugugguuuccgcacccgcugccacccccgccccuagcguggacauuuauccucuagcgcucaggcccugccgccaucgccgcagauccagcgcccagagagacaccagagaacccaccauggcccccuuugagccccuggcuucuggcauccuguuguugcuguggcugauagcccccagcagggccugcaccugugucccaccccacccacagacggccuucugcaauuccgaccucgucaucagggccaaguucguggggacaccagaagucaaccagaccaccuuauaccagcguuaugagaucaagaugaccaagauguauaaaggguuccaagccuuaggggaugccgcugacauccgguucgucuacacccccgccauggagagugucugcggauacuuccacaggucccacaaccgcagcgaggaguuucucauugcuggaaaacugcaggauggacucuugcacaucacuaccugcaguuuuguggcucccuggaacagccugagcuuagcucagcgccggggcuucaccaagaccuacacuguuggcugugaggaaugcacaguguuucccuguuuauccauccccugcaaacugcagaguggcacucauugcuuguggacggaccagcuccuccaaggcucugaaaagggcuuccagucccgucaccuugccugccugccucgggagccagggcugugcaccuggcagucccugcggucccagauagccugaauccugcccggaguggaagcugaagccugcacaguguccacccuguucccacucccaucuuucuuccggacaaugaaauaaagaguuaccacccagcagaaaaaaaaaaaaaaaa

SEQ ID NO: 2 - RNA, 3670 nt, Homo sapiens
cgcagcaaacacauccguagaaggcagcgcggccgccgagaaccgcagcgccgcucgcccgccgccccccaccccgccgccccgcccggcgaauugcgccccgcgccccuccccucgcgcccccgagacaaagaggagagaaaguuugcgcggccgagcggggcaggugaggagggugagccgcgcgggaggggcccgccucggccccggcucagcccccgcccgcgcccccagcccgccgccgcgagcagcgcccggaccccccagcggcggcccccgcccgcccagccccccggcccgccaugggcgccgcggcccgcacccugcggcuggcgcucggccuccugcugcuggcgacgcugcuucgcccggccgacgccugcagcugcuccccggugcacccgcaacaggcguuuugcaaugcagauguagugaucagggccaaagcggucagugagaaggaaguggacucuggaaacgacauuuauggcaacccuaucaagaggauccaguaugagaucaagcagauaaagauguucaaagggccugagaaggauauagaguuuaucuacacggcccccuccucggcaguguguggggucucgcuggacguuggaggaaagaaggaauaucucauugcaggaaaggccgagggggacggcaagaugcacaucacccucugugacuucaucgugcccugggacacccugagcaccacccagaagaagagccugaaccacagguaccagaugggcugcgagugcaagaucacgcgcugccccaugaucccgugcuacaucuccuccccggacgagugccucuggauggacugggucacagagaagaacaucaacgggcaccaggccaaguucuucgccugcaucaagagaagugacggcuccugugcgugguaccgcggcgcggcgccccccaagcaggaguuucucgacaucgaggacccauaagcaggccuccaacgccccuguggccaacugcaaaaaaagccuccaaggguuucgacugguccagcucugacaucccuuccuggaaacagcaugaauaaaacacucaucccauggguccaaauuaauaugauucugcuccccccuucuccuuuuagacaugguugugggucuggagggagacguggguccaagguccucaucccauccucccucugccaggcacuaugugucuggggcuucgauccuugggugcaggcagggcugggacacgcggcuucccucccagucccugccuuggcaccgucacagaugccaagcaggcagcacuuagggaucucccagcuggguuagggcagggccuggaaaugugcauuuugcagaaacuuuugagggucguugcaagacuguguagcaggccuaccaggucccuuucaucuugagagggacauggcccuuguuuucugcagcuuccacgccucugcacucccugccccuggcaagugcucccaucgccccggugcccaccaugagcucccagcaccugacuccccccacauccaagggcagccuggaaccaguggcuaguucuugaaggagccccaucaauccuauuaauccucagaauuccagugggagccucccucugagccuuguagaaaugggagcgagaaaccccagcugagcugcguuccagccucagcugagucuuuuuggucugcacccacccccccacccccccccccccgcccacaugcuccccagcuugcaggaggaaucggugagguccuguccugaggcugcuguccggggccgguggcugcccucaaggucccuucccuagcugcugcgguugccauugcuucuugccuguucuggcaucaggcaccuggauugaguugcacagcuuugcuuuauccgggcuugugugcagggcccggcugggcuccccaucugcacauccugaggacagaaaaagcugggucuugcugugcccucccaggcuuaguguucccucccucaaagacugacagccaucguucugcacggggcuuucugcaugugacgccagcuaagcauaguaagaaguccagccuaggaagggaaggauuuuggagguagguggcuuuggugacacacucacuucuuucucagccuccaggacacuauggccuguuuuaagagacaucuuauuuuucuaaaggugaauucucagaugauaggugaaccugaguugcagauauaccaacuucugcuuguauuucuuaaaugacaaagauuaccuagcuaagaaacuuccuagggaacuagggaaccuauguguucccucagugugguuuccugaagccagugauauggggguuaggauaggaagaacuuucucgguaaugauaaggagaaucucuuguuuccucccaccuguguuguaaagauaaacugacgauauacaggcacauuauguaaacauacacacgcaaugaaaccgaagcuuggcggccugggcguggucuugcaaaaugcuuccaaagccaccuuagccuguucuauucagcggcaaccccaaagcaccuguuaagacuccugacccccaaguggcaugcagcccccaugcccaccgggaccuggucagcacagaucuugaugacuucccuuucuagggcagacugggaggguauccaggaaucggccccugccccacgggcguuuucaugcuguacagugaccuaaaguugguaagaugucauaauggaccaguccaugugauuucaguauauacaacuccaccagaccccuccaacccauauaacaccccaccccuguucgcuuccuguauggugauaucauauguaacauuuacuccuguuucugcugauuguuuuuuuaauguuuugguuuguuuuugacaucagcuguaaucauuccugugcuguguuuuuuauuacccuugguagguauuagacuugcacuuuuuuaaaaaaagguuucugcaucguggaagcauuugacccagaguggaacgcguggccuaugcagguggauuccuucaggucuuuccuuugguucuuugagcaucuuugcuuucauucgucucccgucuuugguucuccaguucaaauuauugcaaaguaaaggaucuuugaguagguucggucugaaagguguggccuuuauauuugauccacacacguuggucuuuuaaccgugcugagcagaaaacaaaacagguuaagaagagccggguggcagcugacagaggaagccgcucaaauaccuucacaauaaauaguggcaauauauauauaguuuaagaaggcucuccauuuggcaucguuuaauuuauauguuauguucuaagcacagcucucuucuccuauuuucauccugcaagcaacucaaaauauuuaaaauaaaguuuacauuguaguuauuuucaaaucuuugcuugauaaguauuaagaaauauuggacuugcugccguaauuuaaagcucuguugauuuuguuuccguuuggauuuuugggggaggggagcacuguguuuaugcuggaauaugaagucugagaccuuccggugcugggaacacacaagaguuguugaaaguugacaagcagacugcgcaugucucugaugcuuuguaucauucuugagcaaucgcucgguccguggacaauaaacaguauuaucaaagagaaaaaaaaaaaaaaaaa

SEQ ID NO: 3 - protein, 207 aa, Homo sapiens
MAPFEPLASGILLLLWLIAPSRACTCVPPHPQTAFCNSDLVIRAKFVGTPEVNQTTLYQRYEIKMTKMYKGFQALGDAADIRFVYTPAMESVCGYFHRSHNRSLHITTEEFLIAGKLQDGLCSFVAPWNSLSLAQRRGFTKTYTVGCEECTVFPCLSIPCKLQSGTHCLWTDQLLQGSEKGFQSRHLACLPREPGLCTWQSLRSQIA

SEQ ID NO: 4 - protein, 218 aa, Homo sapiens
MGAAARTLRLALGLLLLATLLRPADACSCSPVHPQQAFCNADVVIRAKAVSEKEVDSGNDIYGNPIKRIQYEIKQIKMFKGPEKDIEFIYTAPSSAVCGVSLDVGGKKEYLIAGKAEGDGKMHITLCDFIVPWDTLSTTQKKSLNHRYQMGCECKITRCPMIPCYISSPDECLWMDWVTEKNINGHQAKFFACIKRSDGSCAWYRGAAPPKQEFLDIE

SEQ ID NO: 5 - DNA, 21 bp, Artificial
  Chemically synthesized
ccaccuuauaccagcguuatt

SEQ ID NO: 6 - DNA, 21 bp, Artificial
  Chemically synthesized
uaacgcugguauaagguggtt

SEQ ID NO: 7 - DNA, 21 bp, Artificial
  Chemically synthesized
cacuguuggcugugaggaatt

SEQ ID NO: 8 - DNA, 21 bp, Artificial
  Chemically synthesized
uuccucacagccaacagugtt

SEQ ID NO: 9 - DNA, 21 bp, Artificial
  Chemically synthesized
gcacaguguuucccuguuutt

SEQ ID NO: 10 - DNA, 21 bp, Artificial
  Chemically synthesized
aaacagggaaacacugugctt

SEQ ID NO: 11 - DNA, 21 bp, Artificial
  Chemically synthesized
ugcagauguagugaucaggtt

SEQ ID NO: 12 - DNA, 21 bp, Artificial
  Chemically synthesized
ccugaucacuacaucugcatt

SEQ ID NO: 13 - DNA, 21 bp, Artificial
  Chemically synthesized
gaggauccaguaugagauctt

SEQ ID NO: 14 - DNA, 21 bp, Artificial
  Chemically synthesized
gaucucauacuggauccuctt

SEQ ID NO: 15 - DNA, 21 bp, Artificial
  Chemically synthesized
gcagauaaagauguucaaatt

SEQ ID NO: 16 - DNA, 21 bp, Artificial
  Chemically synthesized
uuugaacaucuuuaucugctt

SEQ ID NO: 17 - DNA, 21 bp, Artificial
  Chemically synthesized
ggaauaucucauugcaggatt

SEQ ID NO: 18 - DNA, 21 bp, Artificial
  Chemically synthesized
uccugcaaugagauauucctt

SEQ ID NO: 19 - DNA, 21 bp, Artificial
  Chemically synthesized
uaucucauugcaggaaaggtt

SEQ ID NO: 20 - DNA, 21 bp, Artificial Sequence
  Chemically synthesized
ccuuuccugcaaugagauatt

SEQ ID NO: 21 - RNA, 19 nt, artificial
  Chemically synthesized
guuucucauugcuggaaaa

SEQ ID NO: 22 - RNA, 19 nt, artificial
  Chemically synthesized
cacaguguuucccuguuua

SEQ ID NO: 23 - RNA, 19 nt, artificial
  Chemically synthesized
cuuucuuccggacaaugaa

SEQ ID NO: 24 - RNA, 19 nt, artificial
  Chemically synthesized
gcugaagccugcacagugu

SEQ ID NO: 25 - RNA, 19 nt, artificial
  Chemically synthesized
ggaguuucucauugcugga

SEQ ID NO: 26 - RNA, 19 nt, artificial
  Chemically synthesized
gcacaguguuucccuguuu

SEQ ID NO: 27 - RNA, 19 nt, artificial
  Chemically synthesized
caucuuucuuccggacaau

SEQ ID NO: 28 - RNA, 19 nt, artificial
  Chemically synthesized
ggcuucaccaagaccuaca

SEQ ID NO: 29 - RNA, 19 nt, artificial
  Chemically synthesized
ggcacucauugcuugugga

SEQ ID NO: 30 - RNA, 19 nt, artificial
  Chemically synthesized
cucccaucuuucuuccgga

SEQ ID NO: 31 - RNA, 19 nt, artificial
  Chemically synthesized
guguuucccuguuuaucca

SEQ ID NO: 32 - RNA, 19 nt, artificial
  Chemically synthesized
agucaaccagaccaccuua

SEQ ID NO: 33 - RNA, 19 nt, artificial
  Chemically synthesized
gcccggaguggaagcugaa

SEQ ID NO: 34 - RNA, 19 nt, artificial
  Chemically synthesized
ccaccuuauaccagcguua

SEQ ID NO: 35 - RNA, 19 nt, artificial
  Chemically synthesized
cauggagagugucugcgga

SEQ ID NO: 36 - RNA, 19 nt, artificial
  Chemically synthesized
ccaagauguauaaaggguu

SEQ ID NO: 37 - RNA, 19 nt, artificial
  Chemically synthesized
gagagugucugcggauacu

SEQ ID NO: 38 - RNA, 19 nt, artificial
  Chemically synthesized
agaucaagaugaccaagau

SEQ ID NO: 39 - RNA, 19 nt, artificial
  Chemically synthesized
cugcagaguggcacucauu

SEQ ID NO: 40 - RNA, 19 nt, artificial
  Chemically synthesized
ccuggaacagccugagcuu

SEQ ID NO: 41 - RNA, 19 nt, artificial
  Chemically synthesized
cacuguuggcugugaggaa

SEQ ID NO: 42 - RNA, 19 nt, artificial
  Chemically synthesized
ccagaagucaaccagacca

SEQ ID NO: 43 - RNA, 19 nt, artificial
  Chemically synthesized
gauggacucuugcacauca

SEQ ID NO: 44 - RNA, 19 nt, artificial
  Chemically synthesized
aguuucucauugcuggaaa

SEQ ID NO: 45 - RNA, 19 nt, artificial
  Chemically synthesized
gcuccuccaaggcucugaa

SEQ ID NO: 46 - RNA, 19 nt, artificial
  Chemically synthesized
acaguguuucccuguuuau

SEQ ID NO: 47 - RNA, 19 nt, artificial
  Chemically synthesized
gucugcggauacuuccaca

SEQ ID NO: 48 - RNA, 19 nt, artificial
  Chemically synthesized
cuggaacagccugagcuua

SEQ ID NO: 49 - RNA, 19 nt, artificial
  Chemically synthesized
gggcugugcaccuggcagu

SEQ ID NO: 50 - RNA, 19 nt, artificial
  Chemically synthesized
gugucugcggauacuucca

SEQ ID NO: 51 - RNA, 19 nt, artificial
  Chemically synthesized
augagaucaagaugaccaa

SEQ ID NO: 52 - RNA, 19 nt, artificial
  Chemically synthesized
ggaagcugaagccugcaca

SEQ ID NO: 53 - RNA, 19 nt, artificial
  Chemically synthesized
gaguuucucauugcuggaa

SEQ ID NO: 54 - RNA, 19 nt, artificial
  Chemically synthesized
cagacggccuucugcaauu

SEQ ID NO: 55 - RNA, 19 nt, artificial
  Chemically synthesized
gcacaucacuaccugcagu

SEQ ID NO: 56 - RNA, 19 nt, artificial
  Chemically synthesized
ggcagucccugcgguccca

SEQ ID NO: 57 - RNA, 19 nt, artificial
  Chemically synthesized
gauguauaaaggguuccaa

SEQ ID NO: 58 - RNA, 19 nt, artificial
  Chemically synthesized
cuggcauccuguuguugcu

SEQ ID NO: 59 - RNA, 19 nt, artificial
  Chemically synthesized
ggacggaccagcuccucca

SEQ ID NO: 60 - RNA, 19 nt, artificial
  Chemically synthesized
gaguggcacucauugcuug

SEQ ID NO: 61 - RNA, 19 nt, artificial
  Chemically synthesized
agagugucugcggauacuu

SEQ ID NO: 62 - RNA, 19 nt, artificial
  Chemically synthesized
accagaccaccuuauacca

SEQ ID NO: 63 - RNA, 19 nt, artificial
  Chemically synthesized
caccaagaccuacacuguu

SEQ ID NO: 64 - RNA, 19 nt, artificial
  Chemically synthesized
ggcauccuguuguugcugu

SEQ ID NO: 65 - RNA, 19 nt, artificial
  Chemically synthesized
ccugaauccugcccggagu

SEQ ID NO: 66 - RNA, 19 nt, artificial
  Chemically synthesized
gucaaccagaccaccuuau

SEQ ID NO: 67 - RNA, 19 nt, artificial
  Chemically synthesized
ggacaccagaagucaacca

SEQ ID NO: 68 - RNA, 19 nt, artificial
  Chemically synthesized
agcguuaugagaucaagau

SEQ ID NO: 69 - RNA, 19 nt, artificial
  Chemically synthesized
ugcacaguguuucccuguu

SEQ ID NO: 70 - RNA, 19 nt, artificial
  Chemically synthesized
acugcagaguggcacucau

SEQ ID NO: 71 - RNA, 19 nt, artificial
  Chemically synthesized
cccaucuuucuuccggaca

SEQ ID NO: 72 - RNA, 19 nt, artificial
  Chemically synthesized
gugaggaaugcacaguguu

SEQ ID NO: 73 - RNA, 19 nt, artificial
  Chemically synthesized
ccuccaaggcucugaaaag

SEQ ID NO: 74 - RNA, 19 nt, artificial
  Chemically synthesized
caucacuaccugcaguuuu

SEQ ID NO: 75 - RNA, 19 nt, artificial
  Chemically synthesized
agcugaagccugcacagug

SEQ ID NO: 76 - RNA, 19 nt, artificial
  Chemically synthesized
gcacaguguccacccuguu

SEQ ID NO: 77 - RNA, 19 nt, artificial
  Chemically synthesized
ccagcuccuccaaggcucu

SEQ ID NO: 78 - RNA, 19 nt, artificial
  Chemically synthesized
cuguuguugcuguggcuga

SEQ ID NO: 79 - RNA, 19 nt, artificial
  Chemically synthesized
ucuuccggacaaugaaaua

SEQ ID NO: 80 - RNA, 19 nt, artificial
  Chemically synthesized
gcucccuggaacagccuga

SEQ ID NO: 81 - RNA, 19 nt, artificial
  Chemically synthesized
auaaaggguuccaagccuu

SEQ ID NO: 82 - RNA, 19 nt, artificial
  Chemically synthesized
gaguggaagcugaagccug

SEQ ID NO: 83 - RNA, 19 nt, artificial
  Chemically synthesized
caaacugcagaguggcacu

SEQ ID NO: 84 - RNA, 19 nt, artificial
  Chemically synthesized
cggccuucugcaauuccga

SEQ ID NO: 85 - RNA, 19 nt, artificial
  Chemically synthesized
cuccuccaaggcucugaaa

SEQ ID NO: 86 - RNA, 19 nt, artificial
  Chemically synthesized
ccugcaaacugcagagugg

SEQ ID NO: 87 - RNA, 19 nt, artificial
  Chemically synthesized
cacaucacuaccugcaguu

SEQ ID NO: 88 - RNA, 19 nt, artificial
  Chemically synthesized
ugcccggaguggaagcuga

SEQ ID NO: 89 - RNA, 19 nt, artificial
  Chemically synthesized
gcuucuggcauccuguugu

SEQ ID NO: 90 - RNA, 19 nt, artificial
  Chemically synthesized
uuucuuccggacaaugaaa

SEQ ID NO: 91 - RNA, 19 nt, artificial
  Chemically synthesized
ugcacaguguccacccugu

SEQ ID NO: 92 - RNA, 19 nt, artificial
  Chemically synthesized
gaccuacacuguuggcugu

SEQ ID NO: 93 - RNA, 19 nt, artificial
  Chemically synthesized
cacagacggccuucugcaa

SEQ ID NO: 94 - RNA, 19 nt, artificial
  Chemically synthesized
agggcuuccagucccguca

SEQ ID NO: 95 - RNA, 19 nt, artificial
  Chemically synthesized
cccagauagccugaauccu

SEQ ID NO: 96 - RNA, 19 nt, artificial
  Chemically synthesized
guuguugcuguggcugaua

SEQ ID NO: 97 - RNA, 19 nt, artificial
  Chemically synthesized
gucccugcggucccagaua

SEQ ID NO: 98 - RNA, 19 nt, artificial
  Chemically synthesized
cuuccagucccgucaccuu

SEQ ID NO: 99 - RNA, 19 nt, artificial
  Chemically synthesized
ccuacacuguuggcuguga

SEQ ID NO: 100 - RNA, 19 nt, artificial
  Chemically synthesized
acaucacuaccugcaguuu

SEQ ID NO: 101 - RNA, 19 nt, artificial
  Chemically synthesized
ucuuucuuccggacaauga

SEQ ID NO: 102 - RNA, 19 nt, artificial
  Chemically synthesized
ccagauagccugaauccug

SEQ ID NO: 103 - RNA, 19 nt, artificial
  Chemically synthesized
caguguuucccuguuuauc

SEQ ID NO: 104 - RNA, 19 nt, artificial
  Chemically synthesized
cuggcuucuggcauccugu

SEQ ID NO: 105 - RNA, 19 nt, artificial
  Chemically synthesized
gacggaccagcuccuccaa

SEQ ID NO: 106 - RNA, 19 nt, artificial
  Chemically synthesized
uguuguugcuguggcugau

SEQ ID NO: 107 - RNA, 19 nt, artificial
  Chemically synthesized
gacucuugcacaucacuac

SEQ ID NO: 108 - RNA, 19 nt, artificial
  Chemically synthesized
cccgccauggagagugucu

SEQ ID NO: 109 - RNA, 19 nt, artificial
  Chemically synthesized
cgaggaguuucucauugcu

SEQ ID NO: 110 - RNA, 19 nt, artificial
  Chemically synthesized
cacaggucccacaaccgca

SEQ ID NO: 111 - RNA, 19 nt, artificial
  Chemically synthesized
acaccagaagucaaccaga

SEQ ID NO: 112 - RNA, 19 nt, artificial
  Chemically synthesized
uguucccacucccaucuuu

SEQ ID NO: 113 - RNA, 19 nt, artificial
  Chemically synthesized
cccuguucccacucccauc

SEQ ID NO: 114 - RNA, 19 nt, artificial
  Chemically synthesized
caccuuauaccagcguuau

SEQ ID NO: 115 - RNA, 19 nt, artificial
  Chemically synthesized
caccagaagucaaccagac

SEQ ID NO: 116 - RNA, 19 nt, artificial
  Chemically synthesized
uccuccaaggcucugaaaa

SEQ ID NO: 117 - RNA, 19 nt, artificial
  Chemically synthesized
gaagccugcacagugucca

SEQ ID NO: 118 - RNA, 19 nt, artificial
  Chemically synthesized
ccugcacaguguccacccu

SEQ ID NO: 119 - RNA, 19 nt, artificial
  Chemically synthesized
ccgccauggagagugucug

SEQ ID NO: 120 - RNA, 19 nt, artificial
  Chemically synthesized
uaaaggguuccaagccuua

SEQ ID NO: 121 - RNA, 19 nt, artificial
  Chemically synthesized
caagaugaccaagauguau

SEQ ID NO: 122 - RNA, 19 nt, artificial
  Chemically synthesized
guuuuguggcucccuggaa

SEQ ID NO: 123 - RNA, 19 nt, artificial
  Chemically synthesized
ggaguggaagcugaagccu

SEQ ID NO: 124 - RNA, 19 nt, artificial
  Chemically synthesized
cugacauccgguucgucua

SEQ ID NO: 125 - RNA, 19 nt, artificial
  Chemically synthesized
gcguuaugagaucaagaug

SEQ ID NO: 126 - RNA, 19 nt, artificial
  Chemically synthesized
cggaccagcuccuccaagg

SEQ ID NO: 127 - RNA, 19 nt, artificial
  Chemically synthesized
caggauggacucuugcaca

SEQ ID NO: 128 - RNA, 19 nt, artificial
  Chemically synthesized
caagauguauaaaggguuc

SEQ ID NO: 129 - RNA, 19 nt, artificial
  Chemically synthesized
uuuuccagcaaugagaaac

SEQ ID NO: 130 - RNA, 19 nt, artificial
  Chemically synthesized
uaaacagggaaacacugug

SEQ ID NO: 131 - RNA, 19 nt, artificial
  Chemically synthesized
uucauuguccggaagaaag

SEQ ID NO: 132 - RNA, 19 nt, artificial
  Chemically synthesized
acacugugcaggcuucagc

SEQ ID NO: 133 - RNA, 19 nt, artificial
  Chemically synthesized
uccagcaaugagaaacucc

SEQ ID NO: 134 - RNA, 19 nt, artificial
  Chemically synthesized
aaacagggaaacacugugc

SEQ ID NO: 135 - RNA, 19 nt, artificial
  Chemically synthesized
auuguccggaagaaagaug

SEQ ID NO: 136 - RNA, 19 nt, artificial
  Chemically synthesized
uguaggucuuggugaagcc

SEQ ID NO: 137 - RNA, 19 nt, artificial
  Chemically synthesized
uccacaagcaaugagugcc

SEQ ID NO: 138 - RNA, 19 nt, artificial
  Chemically synthesized
uccggaagaaagaugggag

SEQ ID NO: 139 - RNA, 19 nt, artificial
  Chemically synthesized
uggauaaacagggaaacac

SEQ ID NO: 140 - RNA, 19 nt, artificial
  Chemically synthesized
uaagguggucugguugacu

SEQ ID NO: 141 - RNA, 19 nt, artificial
  Chemically synthesized
uucagcuuccacuccgggc

SEQ ID NO: 142 - RNA, 19 nt, artificial
  Chemically synthesized
uaacgcugguauaaggugg

SEQ ID NO: 143 - RNA, 19 nt, artificial
  Chemically synthesized
uccgcagacacucuccaug

SEQ ID NO: 144 - RNA, 19 nt, artificial
  Chemically synthesized
aacccuuuauacaucuugg

SEQ ID NO: 145 - RNA, 19 nt, artificial
  Chemically synthesized
aguauccgcagacacucuc

SEQ ID NO: 146 - RNA, 19 nt, artificial
  Chemically synthesized
aucuuggucaucuugaucu

SEQ ID NO: 147 - RNA, 19 nt, artificial
  Chemically synthesized
aaugagugccacucugcag

SEQ ID NO: 148 - RNA, 19 nt, artificial
  Chemically synthesized
aagcucaggcuguuccagg

SEQ ID NO: 149 - RNA, 19 nt, artificial
  Chemically synthesized
uuccucacagccaacagug

SEQ ID NO: 150 - RNA, 19 nt, artificial
  Chemically synthesized
uggucugguugacuucugg

SEQ ID NO: 151 - RNA, 19 nt, artificial
  Chemically synthesized
ugaugugcaagaguccauc

SEQ ID NO: 152 - RNA, 19 nt, artificial
  Chemically synthesized
uuuccagcaaugagaaacu

SEQ ID NO: 153 - RNA, 19 nt, artificial
  Chemically synthesized
uucagagccuuggaggagc

SEQ ID NO: 154 - RNA, 19 nt, artificial
  Chemically synthesized
auaaacagggaaacacugu

SEQ ID NO: 155 - RNA, 19 nt, artificial
  Chemically synthesized
uguggaaguauccgcagac

SEQ ID NO: 156 - RNA, 19 nt, artificial
  Chemically synthesized
uaagcucaggcuguuccag

SEQ ID NO: 157 - RNA, 19 nt, artificial
  Chemically synthesized
acugccaggugcacagccc

SEQ ID NO: 158 - RNA, 19 nt, artificial
  Chemically synthesized
uggaaguauccgcagacac

SEQ ID NO: 159 - RNA, 19 nt, artificial
  Chemically synthesized
uuggucaucuugaucucau

SEQ ID NO: 160 - RNA, 19 nt, artificial
  Chemically synthesized
ugugcaggcuucagcuucc

SEQ ID NO: 161 - RNA, 19 nt, artificial
  Chemically synthesized
uuccagcaaugagaaacuc

SEQ ID NO: 162 - RNA, 19 nt, artificial
  Chemically synthesized
aauugcagaaggccgucug

SEQ ID NO: 163 - RNA, 19 nt, artificial
  Chemically synthesized
acugcagguagugaugugc

SEQ ID NO: 164 - RNA, 19 nt, artificial
  Chemically synthesized
ugggaccgcagggacugcc

SEQ ID NO: 165 - RNA, 19 nt, artificial
  Chemically synthesized
uuggaacccuuuauacauc

SEQ ID NO: 166 - RNA, 19 nt, artificial
  Chemically synthesized
agcaacaacaggaugccag

SEQ ID NO: 167 - RNA, 19 nt, artificial
  Chemically synthesized
uggaggagcugguccgucc

SEQ ID NO: 168 - RNA, 19 nt, artificial
  Chemically synthesized
caagcaaugagugccacuc

SEQ ID NO: 169 - RNA, 19 nt, artificial
  Chemically synthesized
aaguauccgcagacacucu

SEQ ID NO: 170 - RNA, 19 nt, artificial
  Chemically synthesized
ugguauaagguggucuggu

SEQ ID NO: 171 - RNA, 19 nt, artificial
  Chemically synthesized
aacaguguaggucuuggug

SEQ ID NO: 172 - RNA, 19 nt, artificial
  Chemically synthesized
acagcaacaacaggaugcc

SEQ ID NO: 173 - RNA, 19 nt, artificial
  Chemically synthesized
acuccgggcaggauucagg

SEQ ID NO: 174 - RNA, 19 nt, artificial
  Chemically synthesized
auaagguggucugguugac

SEQ ID NO: 175 - RNA, 19 nt, artificial
  Chemically synthesized
ugguugacuucuggugucc

SEQ ID NO: 176 - RNA, 19 nt, artificial
  Chemically synthesized
aucuugaucucauaacgcu

SEQ ID NO: 177 - RNA, 19 nt, artificial
  Chemically synthesized
aacagggaaacacugugca

SEQ ID NO: 178 - RNA, 19 nt, artificial
  Chemically synthesized
augagugccacucugcagu

SEQ ID NO: 179 - RNA, 19 nt, artificial
  Chemically synthesized
uguccggaagaaagauggg

SEQ ID NO: 180 - RNA, 19 nt, artificial
  Chemically synthesized
aacacugugcauuccucac

SEQ ID NO: 181 - RNA, 19 nt, artificial
  Chemically synthesized
cuuuucagagccuuggagg

SEQ ID NO: 182 - RNA, 19 nt, artificial
  Chemically synthesized
aaaacugcagguagugaug

SEQ ID NO: 183 - RNA, 19 nt, artificial
  Chemically synthesized
cacugugcaggcuucagcu

SEQ ID NO: 184 - RNA, 19 nt, artificial
  Chemically synthesized
aacaggguggacacugugc

SEQ ID NO: 185 - RNA, 19 nt, artificial
  Chemically synthesized
agagccuuggaggagcugg

SEQ ID NO: 186 - RNA, 19 nt, artificial
  Chemically synthesized
ucagccacagcaacaacag

SEQ ID NO: 187 - RNA, 19 nt, artificial
  Chemically synthesized
uauuucauuguccggaaga

SEQ ID NO: 188 - RNA, 19 nt, artificial
  Chemically synthesized
ucaggcuguuccagggagc

SEQ ID NO: 189 - RNA, 19 nt, artificial
  Chemically synthesized
aaggcuuggaacccuuuau

SEQ ID NO: 190 - RNA, 19 nt, artificial
  Chemically synthesized
caggcuucagcuuccacuc

SEQ ID NO: 191 - RNA, 19 nt, artificial
  Chemically synthesized
agugccacucugcaguuug

SEQ ID NO: 192 - RNA, 19 nt, artificial
  Chemically synthesized
ucggaauugcagaaggccg

SEQ ID NO: 193 - RNA, 19 nt, artificial
  Chemically synthesized
uuucagagccuuggaggag

SEQ ID NO: 194 - RNA, 19 nt, artificial
  Chemically synthesized
ccacucugcaguuugcagg

SEQ ID NO: 195 - RNA, 19 nt, artificial
  Chemically synthesized
aacugcagguagugaugug

SEQ ID NO: 196 - RNA, 19 nt, artificial
  Chemically synthesized
ucagcuuccacuccgggca

SEQ ID NO: 197 - RNA, 19 nt, artificial
  Chemically synthesized
acaacaggaugccagaagc

SEQ ID NO: 198 - RNA, 19 nt, artificial
  Chemically synthesized
uuucauuguccggaagaaa

SEQ ID NO: 199 - RNA, 19 nt, artificial
  Chemically synthesized
acaggguggacacugugca

SEQ ID NO: 200 - RNA, 19 nt, artificial
  Chemically synthesized
acagccaacaguguagguc

SEQ ID NO: 201 - RNA, 19 nt, artificial
  Chemically synthesized
uugcagaaggccgucugug

SEQ ID NO: 202 - RNA, 19 nt, artificial
  Chemically synthesized
ugacgggacuggaagcccu

SEQ ID NO: 203 - RNA, 19 nt, artificial
  Chemically synthesized
aggauucaggcuaucuggg

SEQ ID NO: 204 - RNA, 19 nt, artificial
  Chemically synthesized
uaucagccacagcaacaac

SEQ ID NO: 205 - RNA, 19 nt, artificial
  Chemically synthesized
uaucugggaccgcagggac

SEQ ID NO: 206 - RNA, 19 nt, artificial
  Chemically synthesized
aaggugacgggacuggaag

SEQ ID NO: 207 - RNA, 19 nt, artificial
  Chemically synthesized
ucacagccaacaguguagg

SEQ ID NO: 208 - RNA, 19 nt, artificial
  Chemically synthesized
aaacugcagguagugaugu

SEQ ID NO: 209 - RNA, 19 nt, artificial
  Chemically synthesized
ucauuguccggaagaaaga

SEQ ID NO: 210 - RNA, 19 nt, artificial
  Chemically synthesized
caggauucaggcuaucugg

SEQ ID NO: 211 - RNA, 19 nt, artificial
  Chemically synthesized
gauaaacagggaaacacug

SEQ ID NO: 212 - RNA, 19 nt, artificial
  Chemically synthesized
acaggaugccagaagccag

SEQ ID NO: 213 - RNA, 19 nt, artificial
  Chemically synthesized
uuggaggagcugguccguc

SEQ ID NO: 214 - RNA, 19 nt, artificial
  Chemically synthesized
aucagccacagcaacaaca

SEQ ID NO: 215 - RNA, 19 nt, artificial
  Chemically synthesized
guagugaugugcaagaguc

SEQ ID NO: 216 - RNA, 19 nt, artificial
  Chemically synthesized
agacacucuccauggcggg

SEQ ID NO: 217 - RNA, 19 nt, artificial
  Chemically synthesized
agcaaugagaaacuccucg

SEQ ID NO: 218 - RNA, 19 nt, artificial
  Chemically synthesized
ugcgguugugggaccugug

SEQ ID NO: 219 - RNA, 19 nt, artificial
  Chemically synthesized
ucugguugacuucuggugu

SEQ ID NO: 220 - RNA, 19 nt, artificial
  Chemically synthesized
aaagaugggagugggaaca

SEQ ID NO: 221 - RNA, 19 nt, artificial
  Chemically synthesized
gaugggagugggaacaggg

SEQ ID NO: 222 - RNA, 19 nt, artificial
  Chemically synthesized
auaacgcugguauaaggug

SEQ ID NO: 223 - RNA, 19 nt, artificial
  Chemically synthesized
gucugguugacuucuggug

SEQ ID NO: 224 - RNA, 19 nt, artificial
  Chemically synthesized
uuuucagagccuuggagga

SEQ ID NO: 225 - RNA, 19 nt, artificial
  Chemically synthesized
uggacacugugcaggcuuc

SEQ ID NO: 226 - RNA, 19 nt, artificial
  Chemically synthesized
aggguggacacugugcagg

SEQ ID NO: 227 - RNA, 19 nt, artificial
  Chemically synthesized
cagacacucuccauggcgg

SEQ ID NO: 228 - RNA, 19 nt, artificial
  Chemically synthesized
uaaggcuuggaacccuuua

SEQ ID NO: 229 - RNA, 19 nt, artificial
  Chemically synthesized
auacaucuuggucaucuug

SEQ ID NO: 230 - RNA, 19 nt, artificial
  Chemically synthesized
uuccagggagccacaaaac

SEQ ID NO: 231 - RNA, 19 nt, artificial
  Chemically synthesized
aggcuucagcuuccacucc

SEQ ID NO: 232 - RNA, 19 nt, artificial
  Chemically synthesized
uagacgaaccggaugucag

SEQ ID NO: 233 - RNA, 19 nt, artificial
  Chemically synthesized
caucuugaucucauaacgc

SEQ ID NO: 234 - RNA, 19 nt, artificial
  Chemically synthesized
ccuuggaggagcugguccg

SEQ ID NO: 235 - RNA, 19 nt, artificial
  Chemically synthesized
ugugcaagaguccauccug

SEQ ID NO: 236 - RNA, 19 nt, Artificial Sequence
  Chemically synthesized
gaacccuuuauacaucuug

SEQ ID NO: 237 - RNA, 19 nt, artificial
  Chemically synthesized
accaccuuauaccagcguu

SEQ ID NO: 238 - RNA, 19 nt, artificial
  Chemically synthesized
accgcagcgaggaguuucu

SEQ ID NO: 239 - RNA, 19 nt, artificial
  Chemically synthesized
agaccaccuuauaccagcg

SEQ ID NO: 240 - RNA, 19 nt, artificial
  Chemically synthesized
gggcuucaccaagaccuac

SEQ ID NO: 241 - RNA, 19 nt, artificial
  Chemically synthesized
caaccgcagcgaggaguuu

SEQ ID NO: 242 - RNA, 19 nt, artificial
  Chemically synthesized
cagaccaccuuauaccagc

SEQ ID NO: 243 - RNA, 19 nt, artificial
  Chemically synthesized
accuuauaccagcguuaug

SEQ ID NO: 244 - RNA, 19 nt, artificial
  Chemically synthesized
cgucaucagggccaaguuc

SEQ ID NO: 245 - RNA, 19 nt, artificial
  Chemically synthesized
augcacaguguuucccugu

SEQ ID NO: 246 - RNA, 19 nt, artificial
  Chemically synthesized
accuggcagucccugcggu

SEQ ID NO: 247 - RNA, 19 nt, artificial
  Chemically synthesized
gaccaccuuauaccagcgu

SEQ ID NO: 248 - RNA, 19 nt, artificial
  Chemically synthesized
ccgcagcgaggaguuucuc

SEQ ID NO: 249 - RNA, 19 nt, artificial
  Chemically synthesized
aaccgcagcgaggaguuuc

SEQ ID NO: 250 - RNA, 19 nt, artificial
  Chemically synthesized
uuaugagaucaagaugacc

SEQ ID NO: 251 - RNA, 19 nt, artificial
  Chemically synthesized
accagcguuaugagaucaa

SEQ ID NO: 252 - RNA, 19 nt, artificial
  Chemically synthesized
aacgcugguauaagguggu

SEQ ID NO: 253 - RNA, 19 nt, artificial
  Chemically synthesized
agaaacuccucgcugcggu

SEQ ID NO: 254 - RNA, 19 nt, artificial
  Chemically synthesized
cgcugguauaagguggucu

SEQ ID NO: 255 - RNA, 19 nt, artificial
  Chemically synthesized
guaggucuuggugaagccc

SEQ ID NO: 256 - RNA, 19 nt, artificial
  Chemically synthesized
aaacuccucgcugcgguug

SEQ ID NO: 257 - RNA, 19 nt, artificial
  Chemically synthesized
gcugguauaagguggucug

SEQ ID NO: 258 - RNA, 19 nt, artificial
  Chemically synthesized
cauaacgcugguauaaggu

SEQ ID NO: 259 - RNA, 19 nt, artificial
  Chemically synthesized
gaacuuggcccugaugacg

SEQ ID NO: 260 - RNA, 19 nt, artificial
  Chemically synthesized
acagggaaacacugugcau

SEQ ID NO: 261 - RNA, 19 nt, artificial
  Chemically synthesized
accgcagggacugccaggu

SEQ ID NO: 262 - RNA, 19 nt, artificial
  Chemically synthesized
acgcugguauaaggugguc

SEQ ID NO: 263 - RNA, 19 nt, artificial
  Chemically synthesized
gagaaacuccucgcugcgg

SEQ ID NO: 264 - RNA, 19 nt, artificial
  Chemically synthesized
gaaacuccucgcugcgguu

SEQ ID NO: 265 - RNA, 19 nt, artificial
  Chemically synthesized
ggucaucuugaucucauaa

SEQ ID NO: 266 - RNA, 19 nt, Artificial Sequence
  Chemically synthesized
uugaucucauaacgcuggu

SEQ ID NO: 267 - RNA, 19 nt, artificial
  Chemically synthesized
gcacaguguuucccuguuu

SEQ ID NO: 268 - RNA, 19 nt, artificial
  Chemically synthesized
ccaccuuauaccagcguua

SEQ ID NO: 269 - RNA, 19 nt, artificial
  Chemically synthesized
ugcacaguguuucccuguu

SEQ ID NO: 270 - RNA, 19 nt, artificial
  Chemically synthesized
caccuuauaccagcguuau

SEQ ID NO: 271 - RNA, 19 nt, artificial
  Chemically synthesized
gcguuaugagaucaagaug

SEQ ID NO: 272 - RNA, 19 nt, artificial
  Chemically synthesized
accaccuuauaccagcguu

SEQ ID NO: 273 - RNA, 19 nt, artificial
  Chemically synthesized
accgcagcgaggaguuucu

SEQ ID NO: 274 - RNA, 19 nt, artificial
  Chemically synthesized
accagcguuaugagaucaa

SEQ ID NO: 275 - RNA, 19 nt, artificial
  Chemically synthesized
caaccgcagcgaggaguuu

SEQ ID NO: 276 - RNA, 19 nt, artificial
  Chemically synthesized
cagaccaccuuauaccagc

SEQ ID NO: 277 - RNA, 19 nt, artificial
  Chemically synthesized
agaucaagaugaccaagau

SEQ ID NO: 278 - RNA, 19 nt, artificial
  Chemically synthesized
ccagaagucaaccagacca

SEQ ID NO: 279 - RNA, 19 nt, artificial
  Chemically synthesized
augagaucaagaugaccaa

SEQ ID NO: 280 - RNA, 19 nt, artificial
  Chemically synthesized
ccugcaaacugcagagugg

SEQ ID NO: 281 - RNA, 19 nt, artificial
  Chemically synthesized
cacaguguuucccuguuua

SEQ ID NO: 282 - RNA, 19 nt, artificial
  Chemically synthesized
acaguguuucccuguuuau

SEQ ID NO: 283 - RNA, 19 nt, artificial
  Chemically synthesized
caguguuucccuguuuauc

SEQ ID NO: 284 - RNA, 19 nt, artificial
  Chemically synthesized
cuuucuuccggacaaugaa

SEQ ID NO: 285 - RNA, 19 nt, artificial
  Chemically synthesized
guuucucauugcuggaaaa

SEQ ID NO: 286 - RNA, 19 nt, artificial
  Chemically synthesized
caucuuucuuccggacaau

SEQ ID NO: 287 - RNA, 19 nt, artificial
  Chemically synthesized
cucccaucuuucuuccgga

SEQ ID NO: 288 - RNA, 19 nt, artificial
  Chemically synthesized
guguuucccuguuuaucca

SEQ ID NO: 289 - RNA, 19 nt, artificial
  Chemically synthesized
gcccggaguggaagcugaa

SEQ ID NO: 290 - RNA, 19 nt, artificial
  Chemically synthesized
cauggagagugucugcgga

SEQ ID NO: 291 - RNA, 19 nt, artificial
  Chemically synthesized
ccaagauguauaaaggguu

SEQ ID NO: 292 - RNA, 19 nt, artificial
  Chemically synthesized
gagagugucugcggauacu

SEQ ID NO: 293 - RNA, 19 nt, artificial
  Chemically synthesized
cugcagaguggcacucauu

SEQ ID NO: 294 - RNA, 19 nt, artificial
  Chemically synthesized
ccuggaacagccugagcuu

SEQ ID NO: 295 - RNA, 19 nt, artificial
  Chemically synthesized
cacuguuggcugugaggaa

SEQ ID NO: 296 - RNA, 19 nt, artificial
  Chemically synthesized
gauggacucuugcacauca

SEQ ID NO: 297 - RNA, 19 nt, artificial
  Chemically synthesized
aguuucucauugcuggaaa

SEQ ID NO: 298 - RNA, 19 nt, artificial
  Chemically synthesized
gucugcggauacuuccaca

SEQ ID NO: 299 - RNA, 19 nt, artificial
  Chemically synthesized
aaacagggaaacacugugc

SEQ ID NO: 300 - RNA, 19 nt, artificial
  Chemically synthesized
uaacgcugguauaaggugg

SEQ ID NO: 301 - RNA, 19 nt, artificial
  Chemically synthesized
aacagggaaacacugugca

SEQ ID NO: 302 - RNA, 19 nt, artificial
  Chemically synthesized
auaacgcugguauaaggug

SEQ ID NO: 303 - RNA, 19 nt, artificial
  Chemically synthesized
caucuugaucucauaacgc

SEQ ID NO: 304 - RNA, 19 nt, artificial
  Chemically synthesized
aacgcugguauaagguggu

SEQ ID NO: 305 - RNA, 19 nt, artificial
  Chemically synthesized
agaaacuccucgcugcggu

SEQ ID NO: 306 - RNA, 19 nt, artificial
  Chemically synthesized
uugaucucauaacgcuggu

SEQ ID NO: 307 - RNA, 19 nt, artificial
  Chemically synthesized
aaacuccucgcugcgguug

SEQ ID NO: 308 - RNA, 19 nt, artificial
  Chemically synthesized
gcugguauaagguggucug

SEQ ID NO: 309 - RNA, 19 nt, artificial
  Chemically synthesized
aucuuggucaucuugaucu

SEQ ID NO: 310 - RNA, 19 nt, artificial
  Chemically synthesized
uggucugguugacuucugg

SEQ ID NO: 311 - RNA, 19 nt, artificial
  Chemically synthesized
uuggucaucuugaucucau

SEQ ID NO: 312 - RNA, 19 nt, artificial
  Chemically synthesized
ccacucugcaguuugcagg

SEQ ID NO: 313 - RNA, 19 nt, artificial
  Chemically synthesized
uaaacagggaaacacugug

SEQ ID NO: 314 - RNA, 19 nt, artificial
  Chemically synthesized
auaaacagggaaacacugu

SEQ ID NO: 315 - RNA, 19 nt, artificial
  Chemically synthesized
gauaaacagggaaacacug

SEQ ID NO: 316 - RNA, 19 nt, artificial
  Chemically synthesized
uucauuguccggaagaaag

SEQ ID NO: 317 - RNA, 19 nt, artificial
  Chemically synthesized
uuuuccagcaaugagaaac

SEQ ID NO: 318 - RNA, 19 nt, artificial
  Chemically synthesized
auuguccggaagaaagaug

SEQ ID NO: 319 - RNA, 19 nt, artificial
  Chemically synthesized
uccggaagaaagaugggag

SEQ ID NO: 320 - RNA, 19 nt, artificial
  Chemically synthesized
uggauaaacagggaaacac

SEQ ID NO: 321 - RNA, 19 nt, artificial
  Chemically synthesized
uucagcuuccacuccgggc

SEQ ID NO: 322 - RNA, 19 nt, artificial
  Chemically synthesized
uccgcagacacucuccaug

SEQ ID NO: 323 - RNA, 19 nt, artificial
  Chemically synthesized
aacccuuuauacaucuugg

SEQ ID NO: 324 - RNA, 19 nt, artificial
  Chemically synthesized
aguauccgcagacacucuc

SEQ ID NO: 325 - RNA, 19 nt, artificial
  Chemically synthesized
aaugagugccacucugcag

SEQ ID NO: 326 - RNA, 19 nt, artificial
  Chemically synthesized
aagcucaggcuguuccagg

SEQ ID NO: 327 - RNA, 19 nt, artificial
  Chemically synthesized
uuccucacagccaacagug

SEQ ID NO: 328 - RNA, 19 nt, artificial
  Chemically synthesized
ugaugugcaagaguccauc

SEQ ID NO: 329 - RNA, 19 nt, artificial
  Chemically synthesized
uuuccagcaaugagaaacu

SEQ ID NO: 330 - RNA, 19 nt, Artificial Sequence
  Chemically synthesized
uguggaaguauccgcagac

SEQ ID NO: 331 - RNA, 18 nt, artificial
  Chemically synthesized
ggagagugucugcggaua

SEQ ID NO: 332 - RNA, 18 nt, artificial
  Chemically synthesized
gcugaagccugcacagug

SEQ ID NO: 333 - RNA, 18 nt, artificial
  Chemically synthesized
caucuuucuuccggacaa

SEQ ID NO: 334 - RNA, 18 nt, artificial
  Chemically synthesized
ccuccaaggcucugaaaa

SEQ ID NO: 335 - RNA, 18 nt, artificial
  Chemically synthesized
ccgccauggagagugucu

SEQ ID NO: 336 - RNA, 18 nt, artificial
  Chemically synthesized
gagugucugcggauacuu

SEQ ID NO: 337 - RNA, 18 nt, artificial
  Chemically synthesized
gaguggcacucauugcuu

SEQ ID NO: 338 - RNA, 18 nt, artificial
  Chemically synthesized
agcugaagccugcacagu

SEQ ID NO: 339 - RNA, 18 nt, artificial
  Chemically synthesized
agaucaagaugaccaaga

SEQ ID NO: 340 - RNA, 18 nt, artificial
  Chemically synthesized
gacucuugcacaucacua

SEQ ID NO: 341 - RNA, 18 nt, artificial
  Chemically synthesized
gaguggaagcugaagccu

SEQ ID NO: 342 - RNA, 18 nt, artificial
  Chemically synthesized
ccugcaaacugcagagug

SEQ ID NO: 343 - RNA, 18 nt, artificial
  Chemically synthesized
caguguuucccuguuuau

SEQ ID NO: 344 - RNA, 18 nt, artificial
  Chemically synthesized
cccuguucccacucccau

SEQ ID NO: 345 - RNA, 18 nt, artificial
  Chemically synthesized
ccagauagccugaauccu

SEQ ID NO: 346 - RNA, 18 nt, artificial
  Chemically synthesized
ggucccagauagccugaa

SEQ ID NO: 347 - RNA, 18 nt, artificial
  Chemically synthesized
gggcuucaccaagaccua

SEQ ID NO: 348 - RNA, 18 nt, artificial
  Chemically synthesized
gcggauacuuccacaggu

SEQ ID NO: 349 - RNA, 18 nt, artificial
  Chemically synthesized
gagagugucugcggauac

SEQ ID NO: 350 - RNA, 18 nt, artificial
  Chemically synthesized
gcguuaugagaucaagau

SEQ ID NO: 351 - RNA, 18 nt, artificial
  Chemically synthesized
ggaacagccugagcuuag

SEQ ID NO: 352 - RNA, 18 nt, artificial
  Chemically synthesized
cugaaaagggcuuccagu

SEQ ID NO: 353 - RNA, 18 nt, artificial
  Chemically synthesized
ccagcguuaugagaucaa

SEQ ID NO: 354 - RNA, 18 nt, artificial
  Chemically synthesized
caaccagaccaccuuaua

SEQ ID NO: 355 - RNA, 18 nt, artificial
  Chemically synthesized
gaggaaugcacaguguuu

SEQ ID NO: 356 - RNA, 18 nt, artificial
  Chemically synthesized
ccaagauguauaaagggu

SEQ ID NO: 357 - RNA, 18 nt, artificial
  Chemically synthesized
cagaccaccuuauaccag

SEQ ID NO: 358 - RNA, 18 nt, artificial
  Chemically synthesized
aguggaagcugaagccug

SEQ ID NO: 359 - RNA, 18 nt, artificial
  Chemically synthesized
acaguguuucccuguuua

SEQ ID NO: 360 - RNA, 18 nt, artificial
  Chemically synthesized
cgccauggagagugucug

SEQ ID NO: 361 - RNA, 18 nt, artificial
  Chemically synthesized
caccagaagucaaccaga

SEQ ID NO: 362 - RNA, 18 nt, artificial
  Chemically synthesized
cagaagucaaccagacca

SEQ ID NO: 363 - RNA, 18 nt, artificial
  Chemically synthesized
cccacucccaucuuucuu

SEQ ID NO: 364 - RNA, 18 nt, artificial
  Chemically synthesized
gcgaggaguuucucauug

SEQ ID NO: 365 - RNA, 18 nt, artificial
  Chemically synthesized
gcuucaccaagaccuaca

SEQ ID NO: 366 - RNA, 18 nt, artificial
  Chemically synthesized
caucacuaccugcaguuu

SEQ ID NO: 367 - RNA, 18 nt, artificial
  Chemically synthesized
agcguuaugagaucaaga

SEQ ID NO: 368 - RNA, 18 nt, artificial
  Chemically synthesized
cugcagaguggcacucau

SEQ ID NO: 369 - RNA, 18 nt, artificial
  Chemically synthesized
gaagcugaagccugcaca

SEQ ID NO: 370 - RNA, 18 nt, artificial
  Chemically synthesized
aucacuaccugcaguuuu

SEQ ID NO: 371 - RNA, 18 nt, artificial
  Chemically synthesized
gcacaguguuucccuguu

SEQ ID NO: 372 - RNA, 18 nt, artificial
  Chemically synthesized
ccuggaacagccugagcu

SEQ ID NO: 373 - RNA, 18 nt, artificial
  Chemically synthesized
gcauccuguuguugcugu

SEQ ID NO: 374 - RNA, 18 nt, artificial
  Chemically synthesized
gucccagauagccugaau

SEQ ID NO: 375 - RNA, 18 nt, artificial
  Chemically synthesized
aguguuucccuguuuauc

SEQ ID NO: 376 - RNA, 18 nt, artificial
  Chemically synthesized
ggcugugaggaaugcaca

SEQ ID NO: 377 - RNA, 18 nt, artificial
  Chemically synthesized
agaccaccuuauaccagc

SEQ ID NO: 378 - RNA, 18 nt, artificial
  Chemically synthesized
ggauggacucuugcacau

SEQ ID NO: 379 - RNA, 18 nt, artificial
  Chemically synthesized
cggaccagcuccuccaag

SEQ ID NO: 380 - RNA, 18 nt, artificial
  Chemically synthesized
ggccuucugcaauuccga

SEQ ID NO: 381 - RNA, 18 nt, artificial
  Chemically synthesized
gggcuuccagucccguca

SEQ ID NO: 382 - RNA, 18 nt, artificial
  Chemically synthesized
gcagaguggcacucauug

SEQ ID NO: 383 - RNA, 18 nt, artificial
  Chemically synthesized
cagcgaggaguuucucau

SEQ ID NO: 384 - RNA, 18 nt, artificial
  Chemically synthesized
cagauagccugaauccug

SEQ ID NO: 385 - RNA, 18 nt, artificial
  Chemically synthesized
gcagcgaggaguuucuca

SEQ ID NO: 386 - RNA, 18 nt, artificial
  Chemically synthesized
ccugcaguuuuguggcuc

SEQ ID NO: 387 - RNA, 18 nt, artificial
  Chemically synthesized
guuaugagaucaagauga

SEQ ID NO: 388 - RNA, 18 nt, artificial
  Chemically synthesized
caagauguauaaaggguu

SEQ ID NO: 389 - RNA, 18 nt, artificial
  Chemically synthesized
ccggaguggaagcugaag

SEQ ID NO: 390 - RNA, 18 nt, artificial
  Chemically synthesized
aggaguuucucauugcug

SEQ ID NO: 391 - RNA, 18 nt, artificial
  Chemically synthesized
ggcugugcaccuggcagu

SEQ ID NO: 392 - RNA, 18 nt, artificial
  Chemically synthesized
guuucccuguuuauccau

SEQ ID NO: 393 - RNA, 18 nt, artificial
  Chemically synthesized
gcaguuuuguggcucccu

SEQ ID NO: 394 - RNA, 18 nt, artificial
  Chemically synthesized
gucaaccagaccaccuua

SEQ ID NO: 395 - RNA, 18 nt, artificial
  Chemically synthesized
ccauggagagugucugcg

SEQ ID NO: 396 - RNA, 18 nt, artificial
  Chemically synthesized
cuggcauccuguuguugc

SEQ ID NO: 397 - RNA, 18 nt, artificial
  Chemically synthesized
cagacggccuucugcaau

SEQ ID NO: 398 - RNA, 18 nt, artificial
  Chemically synthesized
acugcagaguggcacuca

SEQ ID NO: 399 - RNA, 18 nt, artificial
  Chemically synthesized
cggaguggaagcugaagc

SEQ ID NO: 400 - RNA, 18 nt, artificial
  Chemically synthesized
gccucgggagccagggcu

SEQ ID NO: 401 - RNA, 18 nt, artificial
  Chemically synthesized
ccagaccaccuuauacca

SEQ ID NO: 402 - RNA, 18 nt, artificial
  Chemically synthesized
ggcucugaaaagggcuuc

SEQ ID NO: 403 - RNA, 18 nt, artificial
  Chemically synthesized
gcuggaaaacugcaggau

SEQ ID NO: 404 - RNA, 18 nt, artificial
  Chemically synthesized
ccugaauccugcccggag

SEQ ID NO: 405 - RNA, 18 nt, artificial
  Chemically synthesized
cugaagccugcacagugu

SEQ ID NO: 406 - RNA, 18 nt, artificial
  Chemically synthesized
ggcauccuguuguugcug

SEQ ID NO: 407 - RNA, 18 nt, artificial
  Chemically synthesized
cccugcaaacugcagagu

SEQ ID NO: 408 - RNA, 18 nt, artificial
  Chemically synthesized
cuggaaaacugcaggaug

SEQ ID NO: 409 - RNA, 18 nt, artificial
  Chemically synthesized
ucucauugcuggaaaacu

SEQ ID NO: 410 - RNA, 18 nt, artificial
  Chemically synthesized
guggcucccuggaacagc

SEQ ID NO: 411 - RNA, 18 nt, artificial
  Chemically synthesized
ccagcuccuccaaggcuc

SEQ ID NO: 412 - RNA, 18 nt, artificial
  Chemically synthesized
agaccuacacuguuggcu

SEQ ID NO: 413 - RNA, 18 nt, artificial
  Chemically synthesized
gggacaccagaagucaac

SEQ ID NO: 414 - RNA, 18 nt, artificial
  Chemically synthesized
ggcucccuggaacagccu

SEQ ID NO: 415 - RNA, 18 nt, artificial
  Chemically synthesized
guucccacucccaucuuu

SEQ ID NO: 416 - RNA, 18 nt, artificial
  Chemically synthesized
cucugaaaagggcuucca

SEQ ID NO: 417 - RNA, 18 nt, artificial
  Chemically synthesized
ggcuucuggcauccuguu

SEQ ID NO: 418 - RNA, 18 nt, artificial
  Chemically synthesized
aggaaugcacaguguuuc

SEQ ID NO: 419 - RNA, 18 nt, artificial
  Chemically synthesized
cuucuggcauccuguugu

SEQ ID NO: 420 - RNA, 18 nt, artificial
  Chemically synthesized
caaacugcagaguggcac

SEQ ID NO: 421 - RNA, 18 nt, artificial
  Chemically synthesized
auaccagcguuaugagau

SEQ ID NO: 422 - RNA, 18 nt, artificial
  Chemically synthesized
agagugucugcggauacu

SEQ ID NO: 423 - RNA, 18 nt, artificial
  Chemically synthesized
caccaagaccuacacugu

SEQ ID NO: 424 - RNA, 18 nt, artificial
  Chemically synthesized
gaucaagaugaccaagau

SEQ ID NO: 425 - RNA, 18 nt, artificial
  Chemically synthesized
auguauaaaggguuccaa

SEQ ID NO: 426 - RNA, 18 nt, artificial
  Chemically synthesized
accaagaccuacacuguu

SEQ ID NO: 427 - RNA, 18 nt, artificial
  Chemically synthesized
ccgucaccuugccugccu

SEQ ID NO: 428 - RNA, 18 nt, artificial
  Chemically synthesized
gggagccagggcugugca

SEQ ID NO: 429 - RNA, 18 nt, artificial
  Chemically synthesized
ugcacaguguuucccugu

SEQ ID NO: 430 - RNA, 18 nt, artificial
  Chemically synthesized
ugcagaguggcacucauu

SEQ ID NO: 431 - RNA, 18 nt, artificial
  Chemically synthesized
gugaggaaugcacagugu

SEQ ID NO: 432 - RNA, 18 nt, artificial
  Chemically synthesized
agcgaggaguuucucauu

SEQ ID NO: 433 - RNA, 18 nt, artificial
  Chemically synthesized
gggcugugcaccuggcag

SEQ ID NO: 434 - RNA, 18 nt, artificial
  Chemically synthesized
acucauugcuuguggacg

SEQ ID NO: 435 - RNA, 18 nt, artificial
  Chemically synthesized
uguuguugcuguggcuga

SEQ ID NO: 436 - RNA, 18 nt, artificial
  Chemically synthesized
ugaggaaugcacaguguu

SEQ ID NO: 437 - RNA, 18 nt, artificial
  Chemically synthesized
ccuggcuucuggcauccu

SEQ ID NO: 438 - RNA, 18 nt, artificial
  Chemically synthesized
gcacaguguccacccugu

SEQ ID NO: 439 - RNA, 18 nt, artificial
  Chemically synthesized
aaaggguuccaagccuua

SEQ ID NO: 440 - RNA, 18 nt, artificial
  Chemically synthesized
gcuucuggcauccuguug

SEQ ID NO: 441 - RNA, 18 nt, artificial
  Chemically synthesized
ccaagaccuacacuguug

SEQ ID NO: 442 - RNA, 18 nt, artificial
  Chemically synthesized
aaggguuccaagccuuag

SEQ ID NO: 443 - RNA, 18 nt, artificial
  Chemically synthesized
ugcacaguguccacccug

SEQ ID NO: 444 - RNA, 18 nt, artificial
  Chemically synthesized
gaccuacacuguuggcug

SEQ ID NO: 445 - RNA, 18 nt, artificial
  Chemically synthesized
cccagauagccugaaucc

SEQ ID NO: 446 - RNA, 18 nt, artificial
  Chemically synthesized
ggguuccaagccuuaggg

SEQ ID NO: 447 - RNA, 18 nt, artificial
  Chemically synthesized
ggcuuccagucccgucac

SEQ ID NO: 448 - RNA, 18 nt, artificial
  Chemically synthesized
agugucugcggauacuuc

SEQ ID NO: 449 - RNA, 18 nt, artificial
  Chemically synthesized
ugaccaagauguauaaag

SEQ ID NO: 450 - RNA, 18 nt, artificial
  Chemically synthesized
cagccugagcuuagcuca

SEQ ID NO: 451 - RNA, 18 nt, artificial
  Chemically synthesized
cuuccggacaaugaaaua

SEQ ID NO: 452 - RNA, 18 nt, artificial
  Chemically synthesized
cugugaggaaugcacagu

SEQ ID NO: 453 - RNA, 18 nt, artificial
  Chemically synthesized
gccugaauccugcccgga

SEQ ID NO: 454 - RNA, 18 nt, artificial
  Chemically synthesized
acugcaggauggacucuu

SEQ ID NO: 455 - RNA, 18 nt, artificial
  Chemically synthesized
gucccacaaccgcagcga

SEQ ID NO: 456 - RNA, 18 nt, artificial
  Chemically synthesized
aucuuucuuccggacaau

SEQ ID NO: 457 - RNA, 18 nt, artificial
  Chemically synthesized
auaaaggguuccaagccu

SEQ ID NO: 458 - RNA, 18 nt, artificial
  Chemically synthesized
ucccaucuuucuuccgga

SEQ ID NO: 459 - RNA, 18 nt, artificial
  Chemically synthesized
gaaaagggcuuccagucc

SEQ ID NO: 460 - RNA, 18 nt, artificial
  Chemically synthesized
uggaacagccugagcuua

SEQ ID NO: 461 - RNA, 18 nt, artificial
  Chemically synthesized
caccuuauaccagcguua

SEQ ID NO: 462 - RNA, 18 nt, artificial
  Chemically synthesized
cuguuggcugugaggaau

SEQ ID NO: 463 - RNA, 18 nt, artificial
  Chemically synthesized
gcacaucacuaccugcag

SEQ ID NO: 464 - RNA, 18 nt, artificial
  Chemically synthesized
ugcuguggcugauagccc

SEQ ID NO: 465 - RNA, 18 nt, artificial
  Chemically synthesized
ccacucccaucuuucuuc

SEQ ID NO: 466 - RNA, 18 nt, artificial
  Chemically synthesized
cuggcuucuggcauccug

SEQ ID NO: 467 - RNA, 18 nt, artificial
  Chemically synthesized
cuuccacaggucccacaa

SEQ ID NO: 468 - RNA, 18 nt, artificial
  Chemically synthesized
accagcuccuccaaggcu

SEQ ID NO: 469 - RNA, 18 nt, artificial
  Chemically synthesized
caagaugaccaagaugua

SEQ ID NO: 470 - RNA, 18 nt, artificial
  Chemically synthesized
cccgccauggagaguguc

SEQ ID NO: 471 - RNA, 18 nt, artificial
  Chemically synthesized
cccggaguggaagcugaa

SEQ ID NO: 472 - RNA, 18 nt, artificial
  Chemically synthesized
cgaggaguuucucauugc

SEQ ID NO: 473 - RNA, 18 nt, artificial
  Chemically synthesized
cacaucacuaccugcagu

SEQ ID NO: 474 - RNA, 18 nt, artificial
  Chemically synthesized
cuccaaggcucugaaaag

SEQ ID NO: 475 - RNA, 18 nt, artificial
  Chemically synthesized
ugagaucaagaugaccaa

SEQ ID NO: 476 - RNA, 18 nt, artificial
  Chemically synthesized
gcacucauugcuugugga

SEQ ID NO: 477 - RNA, 18 nt, artificial
  Chemically synthesized
cauugcuuguggacggac

SEQ ID NO: 478 - RNA, 18 nt, artificial
  Chemically synthesized
ggaccagcuccuccaagg

SEQ ID NO: 479 - RNA, 18 nt, artificial
  Chemically synthesized
gccugcacaguguccacc

SEQ ID NO: 480 - RNA, 18 nt, artificial
  Chemically synthesized
uguauaaaggguuccaag

SEQ ID NO: 481 - RNA, 18 nt, artificial
  Chemically synthesized
ccugcacaguguccaccc

SEQ ID NO: 482 - RNA, 18 nt, artificial
  Chemically synthesized
accuuauaccagcguuau

SEQ ID NO: 483 - RNA, 18 nt, artificial
  Chemically synthesized
cuuccagucccgucaccu

SEQ ID NO: 484 - RNA, 18 nt, artificial
  Chemically synthesized
caguguccacccuguucc

SEQ ID NO: 485 - RNA, 18 nt, artificial
  Chemically synthesized
ggaguggaagcugaagcc

SEQ ID NO: 486 - RNA, 18 nt, artificial
  Chemically synthesized
cuuauaccagcguuauga

SEQ ID NO: 487 - RNA, 18 nt, artificial
  Chemically synthesized
ccgcagcgaggaguuucu

SEQ ID NO: 488 - RNA, 18 nt, artificial
  Chemically synthesized
caguuuuguggcucccug

SEQ ID NO: 489 - RNA, 18 nt, artificial
  Chemically synthesized
guauaaaggguuccaagc

SEQ ID NO: 490 - RNA, 18 nt, artificial
  Chemically synthesized
aagccugcacagugucca

SEQ ID NO: 491 - RNA, 18 nt, artificial
  Chemically synthesized
aggauggacucuugcaca

SEQ ID NO: 492 - RNA, 18 nt, artificial
  Chemically synthesized
auggagagugucugcgga

SEQ ID NO: 493 - RNA, 18 nt, artificial
  Chemically synthesized
gccuucugcaauuccgac

SEQ ID NO: 494 - RNA, 18 nt, artificial
  Chemically synthesized
cuucugcaauuccgaccu

SEQ ID NO: 495 - RNA, 18 nt, artificial
  Chemically synthesized
agacggccuucugcaauu

SEQ ID NO: 496 - RNA, 18 nt, artificial
  Chemically synthesized
gcaggauggacucuugca

SEQ ID NO: 497 - RNA, 18 nt, artificial
  Chemically synthesized
gcuuguggacggaccagc

SEQ ID NO: 498 - RNA, 18 nt, artificial
  Chemically synthesized
agaagucaaccagaccac

SEQ ID NO: 499 - RNA, 18 nt, artificial
  Chemically synthesized
cugugcaccuggcagucc

SEQ ID NO: 500 - RNA, 18 nt, artificial
  Chemically synthesized
gaggaguuucucauugcu

SEQ ID NO: 501 - RNA, 18 nt, artificial
  Chemically synthesized
uguucccacucccaucuu

SEQ ID NO: 502 - RNA, 18 nt, artificial
  Chemically synthesized
accgcagcgaggaguuuc

SEQ ID NO: 503 - RNA, 18 nt, artificial
  Chemically synthesized
accagaagucaaccagac

SEQ ID NO: 504 - RNA, 18 nt, artificial
  Chemically synthesized
gcaauuccgaccucguca

SEQ ID NO: 505 - RNA, 18 nt, artificial
  Chemically synthesized
cugcaaacugcagagugg

SEQ ID NO: 506 - RNA, 18 nt, artificial
  Chemically synthesized
ggagccagggcugugcac

SEQ ID NO: 507 - RNA, 18 nt, artificial
  Chemically synthesized
ccuucugcaauuccgacc

SEQ ID NO: 508 - RNA, 18 nt, artificial
  Chemically synthesized
cuugcacaucacuaccug

SEQ ID NO: 509 - RNA, 18 nt, artificial
  Chemically synthesized
ggaaaacugcaggaugga

SEQ ID NO: 510 - RNA, 18 nt, artificial
  Chemically synthesized
aaugcacaguguuucccu

SEQ ID NO: 511 - RNA, 18 nt, artificial
  Chemically synthesized
cccuggaacagccugagc

SEQ ID NO: 512 - RNA, 18 nt, artificial
  Chemically synthesized
ggaugccgcugacauccg

SEQ ID NO: 513 - RNA, 18 nt, artificial
  Chemically synthesized
ggauacuuccacaggucc

SEQ ID NO: 514 - RNA, 18 nt, artificial
  Chemically synthesized
cacucauugcuuguggac

SEQ ID NO: 515 - RNA, 18 nt, artificial
  Chemically synthesized
gacaccagaagucaacca

SEQ ID NO: 516 - RNA, 18 nt, artificial
  Chemically synthesized
cuacacuguuggcuguga

SEQ ID NO: 517 - RNA, 18 nt, artificial
  Chemically synthesized
accaccuuauaccagcgu

SEQ ID NO: 518 - RNA, 18 nt, artificial
  Chemically synthesized
agaguggcacucauugcu

SEQ ID NO: 519 - RNA, 18 nt, artificial
  Chemically synthesized
gcaaacugcagaguggca

SEQ ID NO: 520 - RNA, 18 nt, artificial
  Chemically synthesized
gccgcugacauccgguuc

SEQ ID NO: 521 - RNA, 18 nt, artificial
  Chemically synthesized
uguuucccuguuuaucca

SEQ ID NO: 522 - RNA, 18 nt, artificial
  Chemically synthesized
aagucaaccagaccaccu

SEQ ID NO: 523 - RNA, 18 nt, artificial
  Chemically synthesized
ccacaaccgcagcgagga

SEQ ID NO: 524 - RNA, 18 nt, artificial
  Chemically synthesized
gccugagcuuagcucagc

SEQ ID NO: 525 - RNA, 18 nt, artificial
  Chemically synthesized
gucaucagggccaaguuc

SEQ ID NO: 526 - RNA, 18 nt, artificial
  Chemically synthesized
aaccagaccaccuuauac

SEQ ID NO: 527 - RNA, 18 nt, artificial
  Chemically synthesized
cucccuggaacagccuga

SEQ ID NO: 528 - RNA, 18 nt, artificial
  Chemically synthesized
ccaaggcucugaaaaggg

SEQ ID NO: 529 - RNA, 18 nt, artificial
  Chemically synthesized
cucauugcuggaaaacug

SEQ ID NO: 530 - RNA, 18 nt, artificial
  Chemically synthesized
guguccacccuguuccca

SEQ ID NO: 531 - RNA, 18 nt, artificial
  Chemically synthesized
ccuguucccacucccauc

SEQ ID NO: 532 - RNA, 18 nt, artificial
  Chemically synthesized
caccuugccugccugccu

SEQ ID NO: 533 - RNA, 18 nt, artificial
  Chemically synthesized
ucaccaagaccuacacug

SEQ ID NO: 534 - RNA, 18 nt, artificial
  Chemically synthesized
gaaugcacaguguuuccc

SEQ ID NO: 535 - RNA, 18 nt, artificial
  Chemically synthesized
auggacucuugcacauca

SEQ ID NO: 536 - RNA, 18 nt, artificial
  Chemically synthesized
ugugaggaaugcacagug

SEQ ID NO: 537 - RNA, 18 nt, artificial
  Chemically synthesized
gagccagggcugugcacc

SEQ ID NO: 538 - RNA, 18 nt, artificial
  Chemically synthesized
ugcggucccagauagccu

SEQ ID NO: 539 - RNA, 18 nt, artificial
  Chemically synthesized
cuguucccacucccaucu

SEQ ID NO: 540 - RNA, 18 nt, artificial
  Chemically synthesized
uggcuucuggcauccugu

SEQ ID NO: 541 - RNA, 18 nt, artificial
  Chemically synthesized
cggauacuuccacagguc

SEQ ID NO: 542 - RNA, 18 nt, artificial
  Chemically synthesized
cacaguguccacccuguu

SEQ ID NO: 543 - RNA, 18 nt, artificial
  Chemically synthesized
ggaaugcacaguguuucc

SEQ ID NO: 544 - RNA, 18 nt, artificial
  Chemically synthesized
ccagggcugugcaccugg

SEQ ID NO: 545 - RNA, 18 nt, artificial
  Chemically synthesized
cccugcggucccagauag

SEQ ID NO: 546 - RNA, 18 nt, artificial
  Chemically synthesized
gccugcaccuguguccca

SEQ ID NO: 547 - RNA, 18 nt, artificial
  Chemically synthesized
cagaguggcacucauugc

SEQ ID NO: 548 - RNA, 18 nt, artificial
  Chemically synthesized
ugcacaucacuaccugca

SEQ ID NO: 549 - RNA, 18 nt, artificial
  Chemically synthesized
gaagucaaccagaccacc

SEQ ID NO: 550 - RNA, 18 nt, artificial
  Chemically synthesized
ucccugcggucccagaua

SEQ ID NO: 551 - RNA, 18 nt, artificial
  Chemically synthesized
aguggcacucauugcuug

SEQ ID NO: 552 - RNA, 18 nt, artificial
  Chemically synthesized
guggcacucauugcuugu

SEQ ID NO: 553 - RNA, 18 nt, artificial
  Chemically synthesized
cugaauccugcccggagu

SEQ ID NO: 554 - RNA, 18 nt, artificial
  Chemically synthesized
ccugcaccugugucccac

SEQ ID NO: 555 - RNA, 18 nt, artificial
  Chemically synthesized
gccugccucgggagccag

SEQ ID NO: 556 - RNA, 18 nt, artificial
  Chemically synthesized
gggaugccgcugacaucc

SEQ ID NO: 557 - RNA, 18 nt, artificial
  Chemically synthesized
gcaccuggcagucccugc

SEQ ID NO: 558 - RNA, 18 nt, artificial
  Chemically synthesized
uccuguuguugcuguggc

SEQ ID NO: 559 - RNA, 18 nt, artificial
  Chemically synthesized
ugcggauacuuccacagg

SEQ ID NO: 560 - RNA, 18 nt, artificial
  Chemically synthesized
gaccaagauguauaaagg

SEQ ID NO: 561 - RNA, 18 nt, artificial
  Chemically synthesized
acuguuggcugugaggaa

SEQ ID NO: 562 - RNA, 18 nt, artificial
  Chemically synthesized
cauugcuggaaaacugca

SEQ ID NO: 563 - RNA, 18 nt, artificial
  Chemically synthesized
ugaaaagggcuuccaguc

SEQ ID NO: 564 - RNA, 18 nt, artificial
  Chemically synthesized
cgucaucagggccaaguu

SEQ ID NO: 565 - RNA, 18 nt, artificial
  Chemically synthesized
acaaccgcagcgaggagu

SEQ ID NO: 566 - RNA, 18 nt, artificial
  Chemically synthesized
uguccacccuguucccac

SEQ ID NO: 567 - RNA, 18 nt, artificial
  Chemically synthesized
ccuggcagucccugcggu

SEQ ID NO: 568 - RNA, 18 nt, artificial
  Chemically synthesized
ugaagccugcacaguguc

SEQ ID NO: 569 - RNA, 18 nt, artificial
  Chemically synthesized
ucccagauagccugaauc

SEQ ID NO: 570 - RNA, 18 nt, artificial
  Chemically synthesized
agccugagcuuagcucag

SEQ ID NO: 571 - RNA, 18 nt, artificial
  Chemically synthesized
cacuaccugcaguuuugu

SEQ ID NO: 572 - RNA, 18 nt, artificial
  Chemically synthesized
cugcacaguguccacccu

SEQ ID NO: 573 - RNA, 18 nt, artificial
  Chemically synthesized
cucgggagccagggcugu

SEQ ID NO: 574 - RNA, 18 nt, artificial
  Chemically synthesized
agccagggcugugcaccu

SEQ ID NO: 575 - RNA, 18 nt, artificial
  Chemically synthesized
gccauggagagugucugc

SEQ ID NO: 576 - RNA, 18 nt, artificial
  Chemically synthesized
agggcugugcaccuggca

SEQ ID NO: 577 - RNA, 18 nt, artificial
  Chemically synthesized
gagcuuagcucagcgccg

SEQ ID NO: 578 - RNA, 18 nt, artificial
  Chemically synthesized
aggcucugaaaagggcuu

SEQ ID NO: 579 - RNA, 18 nt, artificial
  Chemically synthesized
acaucacuaccugcaguu

SEQ ID NO: 580 - RNA, 18 nt, artificial
  Chemically synthesized
aaccgcagcgaggaguuu

SEQ ID NO: 581 - RNA, 18 nt, artificial
  Chemically synthesized
cagcuccuccaaggcucu

SEQ ID NO: 582 - RNA, 18 nt, artificial
  Chemically synthesized
uauccgcagacacucucc

SEQ ID NO: 583 - RNA, 18 nt, artificial
  Chemically synthesized
cacugugcaggcuucagc

SEQ ID NO: 584 - RNA, 18 nt, artificial
  Chemically synthesized
uuguccggaagaaagaug

SEQ ID NO: 585 - RNA, 18 nt, artificial
  Chemically synthesized
uuuucagagccuuggagg

SEQ ID NO: 586 - RNA, 18 nt, artificial
  Chemically synthesized
agacacucuccauggcgg

SEQ ID NO: 587 - RNA, 18 nt, artificial
  Chemically synthesized
aaguauccgcagacacuc

SEQ ID NO: 588 - RNA, 18 nt, artificial
  Chemically synthesized
aagcaaugagugccacuc

SEQ ID NO: 589 - RNA, 18 nt, artificial
  Chemically synthesized
acugugcaggcuucagcu

SEQ ID NO: 590 - RNA, 18 nt, artificial
  Chemically synthesized
ucuuggucaucuugaucu

SEQ ID NO: 591 - RNA, 18 nt, artificial
  Chemically synthesized
uagugaugugcaagaguc

SEQ ID NO: 592 - RNA, 18 nt, artificial
  Chemically synthesized
aggcuucagcuuccacuc

SEQ ID NO: 593 - RNA, 18 nt, artificial
  Chemically synthesized
cacucugcaguuugcagg

SEQ ID NO: 594 - RNA, 18 nt, artificial
  Chemically synthesized
auaaacagggaaacacug

SEQ ID NO: 595 - RNA, 18 nt, artificial
  Chemically synthesized
augggagugggaacaggg

SEQ ID NO: 596 - RNA, 18 nt, artificial
  Chemically synthesized
aggauucaggcuaucugg

SEQ ID NO: 597 - RNA, 18 nt, artificial
  Chemically synthesized
uucaggcuaucugggacc

SEQ ID NO: 598 - RNA, 18 nt, artificial
  Chemically synthesized
uaggucuuggugaagccc

SEQ ID NO: 599 - RNA, 18 nt, artificial
  Chemically synthesized
accuguggaaguauccgc

SEQ ID NO: 600 - RNA, 18 nt, artificial
  Chemically synthesized
guauccgcagacacucuc

SEQ ID NO: 601 - RNA, 18 nt, artificial
  Chemically synthesized
aucuugaucucauaacgc

SEQ ID NO: 602 - RNA, 18 nt, artificial
  Chemically synthesized
cuaagcucaggcuguucc

SEQ ID NO: 603 - RNA, 18 nt, artificial
  Chemically synthesized
acuggaagcccuuuucag

SEQ ID NO: 604 - RNA, 18 nt, artificial
  Chemically synthesized
uugaucucauaacgcugg

SEQ ID NO: 605 - RNA, 18 nt, artificial
  Chemically synthesized
uauaagguggucugguug

SEQ ID NO: 606 - RNA, 18 nt, artificial
  Chemically synthesized
aaacacugugcauuccuc

SEQ ID NO: 607 - RNA, 18 nt, artificial
  Chemically synthesized
acccuuuauacaucuugg

SEQ ID NO: 608 - RNA, 18 nt, artificial
  Chemically synthesized
cugguauaagguggucug

SEQ ID NO: 609 - RNA, 18 nt, artificial
  Chemically synthesized
caggcuucagcuuccacu

SEQ ID NO: 610 - RNA, 18 nt, artificial
  Chemically synthesized
uaaacagggaaacacugu

SEQ ID NO: 611 - RNA, 18 nt, artificial
  Chemically synthesized
cagacacucuccauggcg

SEQ ID NO: 612 - RNA, 18 nt, artificial
  Chemically synthesized
ucugguugacuucuggug

SEQ ID NO: 613 - RNA, 18 nt, artificial
  Chemically synthesized
uggucugguugacuucug

SEQ ID NO: 614 - RNA, 18 nt, artificial
  Chemically synthesized
aagaaagaugggaguggg

SEQ ID NO: 615 - RNA, 18 nt, artificial
  Chemically synthesized
caaugagaaacuccucgc

SEQ ID NO: 616 - RNA, 18 nt, artificial
  Chemically synthesized
uguaggucuuggugaagc

SEQ ID NO: 617 - RNA, 18 nt, artificial
  Chemically synthesized
aaacugcagguagugaug

SEQ ID NO: 618 - RNA, 18 nt, artificial
  Chemically synthesized
ucuugaucucauaacgcu

SEQ ID NO: 619 - RNA, 18 nt, artificial
  Chemically synthesized
augagugccacucugcag

SEQ ID NO: 620 - RNA, 18 nt, artificial
  Chemically synthesized
ugugcaggcuucagcuuc

SEQ ID NO: 621 - RNA, 18 nt, artificial
  Chemically synthesized
aaaacugcagguagugau

SEQ ID NO: 622 - RNA, 18 nt, artificial
  Chemically synthesized
aacagggaaacacugugc

SEQ ID NO: 623 - RNA, 18 nt, artificial
  Chemically synthesized
agcucaggcuguuccagg

SEQ ID NO: 624 - RNA, 18 nt, artificial
  Chemically synthesized
acagcaacaacaggaugc

SEQ ID NO: 625 - RNA, 18 nt, artificial
  Chemically synthesized
auucaggcuaucugggac

SEQ ID NO: 626 - RNA, 18 nt, artificial
  Chemically synthesized
gauaaacagggaaacacu

SEQ ID NO: 627 - RNA, 18 nt, artificial
  Chemically synthesized
ugugcauuccucacagcc

SEQ ID NO: 628 - RNA, 18 nt, artificial
  Chemically synthesized
gcugguauaagguggucu

SEQ ID NO: 629 - RNA, 18 nt, artificial
  Chemically synthesized
augugcaagaguccaucc

SEQ ID NO: 630 - RNA, 18 nt, artificial
  Chemically synthesized
cuuggaggagcugguccg

SEQ ID NO: 631 - RNA, 18 nt, artificial
  Chemically synthesized
ucggaauugcagaaggcc

SEQ ID NO: 632 - RNA, 18 nt, artificial
  Chemically synthesized
ugacgggacuggaagccc

SEQ ID NO: 633 - RNA, 18 nt, artificial
  Chemically synthesized
caaugagugccacucugc

SEQ ID NO: 634 - RNA, 18 nt, artificial
  Chemically synthesized
augagaaacuccucgcug

SEQ ID NO: 635 - RNA, 18 nt, artificial
  Chemically synthesized
caggauucaggcuaucug

SEQ ID NO: 636 - RNA, 18 nt, artificial
  Chemically synthesized
ugagaaacuccucgcugc

SEQ ID NO: 637 - RNA, 18 nt, artificial
  Chemically synthesized
gagccacaaaacugcagg

SEQ ID NO: 638 - RNA, 18 nt, artificial
  Chemically synthesized
ucaucuugaucucauaac

SEQ ID NO: 639 - RNA, 18 nt, artificial
  Chemically synthesized
aacccuuuauacaucuug

SEQ ID NO: 640 - RNA, 18 nt, artificial
  Chemically synthesized
cuucagcuuccacuccgg

SEQ ID NO: 641 - RNA, 18 nt, artificial
  Chemically synthesized
cagcaaugagaaacuccu

SEQ ID NO: 642 - RNA, 18 nt, artificial
  Chemically synthesized
acugccaggugcacagcc

SEQ ID NO: 643 - RNA, 18 nt, artificial
  Chemically synthesized
auggauaaacagggaaac

SEQ ID NO: 644 - RNA, 18 nt, artificial
  Chemically synthesized
agggagccacaaaacugc

SEQ ID NO: 645 - RNA, 18 nt, artificial
  Chemically synthesized
uaagguggucugguugac

SEQ ID NO: 646 - RNA, 18 nt, artificial
  Chemically synthesized
cgcagacacucuccaugg

SEQ ID NO: 647 - RNA, 18 nt, artificial
  Chemically synthesized
gcaacaacaggaugccag

SEQ ID NO: 648 - RNA, 18 nt, artificial
  Chemically synthesized
auugcagaaggccgucug

SEQ ID NO: 649 - RNA, 18 nt, artificial
  Chemically synthesized
ugagugccacucugcagu

SEQ ID NO: 650 - RNA, 18 nt, artificial
  Chemically synthesized
gcuucagcuuccacuccg

SEQ ID NO: 651 - RNA, 18 nt, artificial
  Chemically synthesized
agcccuggcucccgaggc

SEQ ID NO: 652 - RNA, 18 nt, artificial
  Chemically synthesized
ugguauaagguggucugg

SEQ ID NO: 653 - RNA, 18 nt, artificial
  Chemically synthesized
gaagcccuuuucagagcc

SEQ ID NO: 654 - RNA, 18 nt, artificial
  Chemically synthesized
auccugcaguuuuccagc

SEQ ID NO: 655 - RNA, 18 nt, artificial
  Chemically synthesized
cuccgggcaggauucagg

SEQ ID NO: 656 - RNA, 18 nt, artificial
  Chemically synthesized
acacugugcaggcuucag

SEQ ID NO: 657 - RNA, 18 nt, artificial
  Chemically synthesized
cagcaacaacaggaugcc

SEQ ID NO: 658 - RNA, 18 nt, artificial
  Chemically synthesized
acucugcaguuugcaggg

SEQ ID NO: 659 - RNA, 18 nt, artificial
  Chemically synthesized
cauccugcaguuuuccag

SEQ ID NO: 660 - RNA, 18 nt, artificial
  Chemically synthesized
aguuuuccagcaaugaga

SEQ ID NO: 661 - RNA, 18 nt, artificial
  Chemically synthesized
gcuguuccagggagccac

SEQ ID NO: 662 - RNA, 18 nt, artificial
  Chemically synthesized
gagccuuggaggagcugg

SEQ ID NO: 663 - RNA, 18 nt, artificial
  Chemically synthesized
agccaacaguguaggucu

SEQ ID NO: 664 - RNA, 18 nt, artificial
  Chemically synthesized
guugacuucugguguccc

SEQ ID NO: 665 - RNA, 18 nt, artificial
  Chemically synthesized
aggcuguuccagggagcc

SEQ ID NO: 666 - RNA, 18 nt, artificial
  Chemically synthesized
aaagaugggagugggaac

SEQ ID NO: 667 - RNA, 18 nt, artificial
  Chemically synthesized
uggaagcccuuuucagag

SEQ ID NO: 668 - RNA, 18 nt, artificial
  Chemically synthesized
aacaggaugccagaagcc

SEQ ID NO: 669 - RNA, 18 nt, artificial
  Chemically synthesized
gaaacacugugcauuccu

SEQ ID NO: 670 - RNA, 18 nt, artificial
  Chemically synthesized
acaacaggaugccagaag

SEQ ID NO: 671 - RNA, 18 nt, artificial
  Chemically synthesized
gugccacucugcaguuug

SEQ ID NO: 672 - RNA, 18 nt, artificial
  Chemically synthesized
aucucauaacgcugguau

SEQ ID NO: 673 - RNA, 18 nt, artificial
  Chemically synthesized
aguauccgcagacacucu

SEQ ID NO: 674 - RNA, 18 nt, artificial
  Chemically synthesized
acaguguaggucuuggug

SEQ ID NO: 675 - RNA, 18 nt, artificial
  Chemically synthesized
aucuuggucaucuugauc

SEQ ID NO: 676 - RNA, 18 nt, artificial
  Chemically synthesized
uuggaacccuuuauacau

SEQ ID NO: 677 - RNA, 18 nt, artificial
  Chemically synthesized
aacaguguaggucuuggu

SEQ ID NO: 678 - RNA, 18 nt, artificial
  Chemically synthesized
aggcaggcaaggugacgg

SEQ ID NO: 679 - RNA, 18 nt, artificial
  Chemically synthesized
ugcacagcccuggcuccc

SEQ ID NO: 680 - RNA, 18 nt, artificial
  Chemically synthesized
acagggaaacacugugca

SEQ ID NO: 681 - RNA, 18 nt, artificial
  Chemically synthesized
aaugagugccacucugca

SEQ ID NO: 682 - RNA, 18 nt, artificial
  Chemically synthesized
acacugugcauuccucac

SEQ ID NO: 683 - RNA, 18 nt, artificial
  Chemically synthesized
aaugagaaacuccucgcu

SEQ ID NO: 684 - RNA, 18 nt, artificial
  Chemically synthesized
cugccaggugcacagccc

SEQ ID NO: 685 - RNA, 18 nt, artificial
  Chemically synthesized
cguccacaagcaaugagu

SEQ ID NO: 686 - RNA, 18 nt, artificial
  Chemically synthesized
ucagccacagcaacaaca

SEQ ID NO: 687 - RNA, 18 nt, artificial
  Chemically synthesized
aacacugugcauuccuca

SEQ ID NO: 688 - RNA, 18 nt, artificial
  Chemically synthesized
aggaugccagaagccagg

SEQ ID NO: 689 - RNA, 18 nt, artificial
  Chemically synthesized
acaggguggacacugugc

SEQ ID NO: 690 - RNA, 18 nt, artificial
  Chemically synthesized
uaaggcuuggaacccuuu

SEQ ID NO: 691 - RNA, 18 nt, artificial
  Chemically synthesized
caacaggaugccagaagc

SEQ ID NO: 692 - RNA, 18 nt, artificial
  Chemically synthesized
caacaguguaggucuugg

SEQ ID NO: 693 - RNA, 18 nt, artificial
  Chemically synthesized
cuaaggcuuggaacccuu

SEQ ID NO: 694 - RNA, 18 nt, artificial
  Chemically synthesized
caggguggacacugugca

SEQ ID NO: 695 - RNA, 18 nt, artificial
  Chemically synthesized
cagccaacaguguagguc

SEQ ID NO: 696 - RNA, 18 nt, artificial
  Chemically synthesized
ggauucaggcuaucuggg

SEQ ID NO: 697 - RNA, 18 nt, artificial
  Chemically synthesized
cccuaaggcuuggaaccc

SEQ ID NO: 698 - RNA, 18 nt, artificial
  Chemically synthesized
gugacgggacuggaagcc

SEQ ID NO: 699 - RNA, 18 nt, artificial
  Chemically synthesized
gaaguauccgcagacacu

SEQ ID NO: 700 - RNA, 18 nt, artificial
  Chemically synthesized
cuuuauacaucuugguca

SEQ ID NO: 701 - RNA, 18 nt, artificial
  Chemically synthesized
ugagcuaagcucaggcug

SEQ ID NO: 702 - RNA, 18 nt, artificial
  Chemically synthesized
uauuucauuguccggaag

SEQ ID NO: 703 - RNA, 18 nt, artificial
  Chemically synthesized
acugugcauuccucacag

SEQ ID NO: 704 - RNA, 18 nt, artificial
  Chemically synthesized
uccgggcaggauucaggc

SEQ ID NO: 705 - RNA, 18 nt, artificial
  Chemically synthesized
aagaguccauccugcagu

SEQ ID NO: 706 - RNA, 18 nt, artificial
  Chemically synthesized
ucgcugcgguugugggac

SEQ ID NO: 707 - RNA, 18 nt, artificial
  Chemically synthesized
auuguccggaagaaagau

SEQ ID NO: 708 - RNA, 18 nt, artificial
  Chemically synthesized
aggcuuggaacccuuuau

SEQ ID NO: 709 - RNA, 18 nt, artificial
  Chemically synthesized
uccggaagaaagauggga

SEQ ID NO: 710 - RNA, 18 nt, artificial
  Chemically synthesized
ggacuggaagcccuuuuc

SEQ ID NO: 711 - RNA, 18 nt, artificial
  Chemically synthesized
uaagcucaggcuguucca

SEQ ID NO: 712 - RNA, 18 nt, artificial
  Chemically synthesized
uaacgcugguauaaggug

SEQ ID NO: 713 - RNA, 18 nt, artificial
  Chemically synthesized
auuccucacagccaacag

SEQ ID NO: 714 - RNA, 18 nt, artificial
  Chemically synthesized
cugcagguagugaugugc

SEQ ID NO: 715 - RNA, 18 nt, artificial
  Chemically synthesized
gggcuaucagccacagca

SEQ ID NO: 716 - RNA, 18 nt, artificial
  Chemically synthesized
gaagaaagaugggagugg

SEQ ID NO: 717 - RNA, 18 nt, artificial
  Chemically synthesized
caggaugccagaagccag

SEQ ID NO: 718 - RNA, 18 nt, artificial
  Chemically synthesized
uugugggaccuguggaag

SEQ ID NO: 719 - RNA, 18 nt, artificial
  Chemically synthesized
agccuuggaggagcuggu

SEQ ID NO: 720 - RNA, 18 nt, artificial
  Chemically synthesized
uacaucuuggucaucuug

SEQ ID NO: 721 - RNA, 18 nt, artificial
  Chemically synthesized
gacacucuccauggcggg

SEQ ID NO: 722 - RNA, 18 nt, artificial
  Chemically synthesized
uucagcuuccacuccggg

SEQ ID NO: 723 - RNA, 18 nt, artificial
  Chemically synthesized
gcaaugagaaacuccucg

SEQ ID NO: 724 - RNA, 18 nt, artificial
  Chemically synthesized
acugcagguagugaugug

SEQ ID NO: 725 - RNA, 18 nt, artificial
  Chemically synthesized
cuuuucagagccuuggag

SEQ ID NO: 726 - RNA, 18 nt, artificial
  Chemically synthesized
uuggucaucuugaucuca

SEQ ID NO: 727 - RNA, 18 nt, artificial
  Chemically synthesized
uccacaagcaaugagugc

SEQ ID NO: 728 - RNA, 18 nt, artificial
  Chemically synthesized
guccguccacaagcaaug

SEQ ID NO: 729 - RNA, 18 nt, artificial
  Chemically synthesized
ccuuggaggagcuggucc

SEQ ID NO: 730 - RNA, 18 nt, artificial
  Chemically synthesized
gguggacacugugcaggc

SEQ ID NO: 731 - RNA, 18 nt, artificial
  Chemically synthesized
cuuggaacccuuuauaca

SEQ ID NO: 732 - RNA, 18 nt, artificial
  Chemically synthesized
ggguggacacugugcagg

SEQ ID NO: 733 - RNA, 18 nt, artificial
  Chemically synthesized
auaacgcugguauaaggu

SEQ ID NO: 734 - RNA, 18 nt, artificial
  Chemically synthesized
aggugacgggacuggaag

SEQ ID NO: 735 - RNA, 18 nt, artificial
  Chemically synthesized
ggaacaggguggacacug

SEQ ID NO: 736 - RNA, 18 nt, artificial
  Chemically synthesized
ggcuucagcuuccacucc

SEQ ID NO: 737 - RNA, 18 nt, artificial
  Chemically synthesized
ucauaacgcugguauaag

SEQ ID NO: 738 - RNA, 18 nt, artificial
  Chemically synthesized
agaaacuccucgcugcgg

SEQ ID NO: 739 - RNA, 18 nt, artificial
  Chemically synthesized
cagggagccacaaaacug

SEQ ID NO: 740 - RNA, 18 nt, artificial
  Chemically synthesized
gcuuggaacccuuuauac

SEQ ID NO: 741 - RNA, 18 nt, artificial
  Chemically synthesized
uggacacugugcaggcuu

SEQ ID NO: 742 - RNA, 18 nt, artificial
  Chemically synthesized
ugugcaagaguccauccu

SEQ ID NO: 743 - RNA, 18 nt, artificial
  Chemically synthesized
uccgcagacacucuccau

SEQ ID NO: 744 - RNA, 18 nt, artificial
  Chemically synthesized
gucggaauugcagaaggc

SEQ ID NO: 745 - RNA, 18 nt, artificial
  Chemically synthesized
aggucggaauugcagaag

SEQ ID NO: 746 - RNA, 18 nt, artificial
  Chemically synthesized
aauugcagaaggccgucu

SEQ ID NO: 747 - RNA, 18 nt, artificial
  Chemically synthesized
ugcaagaguccauccugc

SEQ ID NO: 748 - RNA, 18 nt, artificial
  Chemically synthesized
gcugguccguccacaagc

SEQ ID NO: 749 - RNA, 18 nt, artificial
  Chemically synthesized
guggucugguugacuucu

SEQ ID NO: 750 - RNA, 18 nt, artificial
  Chemically synthesized
ggacugccaggugcacag

SEQ ID NO: 751 - RNA, 18 nt, artificial
  Chemically synthesized
agcaaugagaaacuccuc

SEQ ID NO: 752 - RNA, 18 nt, artificial
  Chemically synthesized
aagaugggagugggaaca

SEQ ID NO: 753 - RNA, 18 nt, artificial
  Chemically synthesized
gaaacuccucgcugcggu

SEQ ID NO: 754 - RNA, 18 nt, artificial
  Chemically synthesized
gucugguugacuucuggu

SEQ ID NO: 755 - RNA, 18 nt, artificial
  Chemically synthesized
ugacgaggucggaauugc

SEQ ID NO: 756 - RNA, 18 nt, artificial
  Chemically synthesized
ccacucugcaguuugcag

SEQ ID NO: 757 - RNA, 18 nt, artificial
  Chemically synthesized
gugcacagcccuggcucc

SEQ ID NO: 758 - RNA, 18 nt, artificial
  Chemically synthesized
ggucggaauugcagaagg

SEQ ID NO: 759 - RNA, 18 nt, artificial
  Chemically synthesized
cagguagugaugugcaag

SEQ ID NO: 760 - RNA, 18 nt, artificial
  Chemically synthesized
uccauccugcaguuuucc

SEQ ID NO: 761 - RNA, 18 nt, artificial
  Chemically synthesized
agggaaacacugugcauu

SEQ ID NO: 762 - RNA, 18 nt, artificial
  Chemically synthesized
gcucaggcuguuccaggg

SEQ ID NO: 763 - RNA, 18 nt, artificial
  Chemically synthesized
cggaugucagcggcaucc

SEQ ID NO: 764 - RNA, 18 nt, artificial
  Chemically synthesized
ggaccuguggaaguaucc

SEQ ID NO: 765 - RNA, 18 nt, artificial
  Chemically synthesized
guccacaagcaaugagug

SEQ ID NO: 766 - RNA, 18 nt, artificial
  Chemically synthesized
ugguugacuucugguguc

SEQ ID NO: 767 - RNA, 18 nt, artificial
  Chemically synthesized
ucacagccaacaguguag

SEQ ID NO: 768 - RNA, 18 nt, artificial
  Chemically synthesized
acgcugguauaagguggu

SEQ ID NO: 769 - RNA, 18 nt, artificial
  Chemically synthesized
agcaaugagugccacucu

SEQ ID NO: 770 - RNA, 18 nt, artificial
  Chemically synthesized
ugccacucugcaguuugc

SEQ ID NO: 771 - RNA, 18 nt, artificial
  Chemically synthesized
gaaccggaugucagcggc

SEQ ID NO: 772 - RNA, 18 nt, artificial
  Chemically synthesized
uggauaaacagggaaaca

SEQ ID NO: 773 - RNA, 18 nt, artificial
  Chemically synthesized
agguggucugguugacuu

SEQ ID NO: 774 - RNA, 18 nt, artificial
  Chemically synthesized
uccucgcugcgguugugg

SEQ ID NO: 775 - RNA, 18 nt, artificial
  Chemically synthesized
gcugagcuaagcucaggc

SEQ ID NO: 776 - RNA, 18 nt, artificial
  Chemically synthesized
gaacuuggcccugaugac

SEQ ID NO: 777 - RNA, 18 nt, artificial
  Chemically synthesized
guauaagguggucugguu

SEQ ID NO: 778 - RNA, 18 nt, artificial
  Chemically synthesized
ucaggcuguuccagggag

SEQ ID NO: 779 - RNA, 18 nt, artificial
  Chemically synthesized
cccuuuucagagccuugg

SEQ ID NO: 780 - RNA, 18 nt, artificial
  Chemically synthesized
caguuuuccagcaaugag

SEQ ID NO: 781 - RNA, 18 nt, artificial
  Chemically synthesized
ugggaacaggguggacac

SEQ ID NO: 782 - RNA, 18 nt, artificial
  Chemically synthesized
gaugggagugggaacagg

SEQ ID NO: 783 - RNA, 18 nt, artificial
  Chemically synthesized
aggcaggcaggcaaggug

SEQ ID NO: 784 - RNA, 18 nt, artificial
  Chemically synthesized
caguguaggucuugguga

SEQ ID NO: 785 - RNA, 18 nt, artificial
  Chemically synthesized
gggaaacacugugcauuc

SEQ ID NO: 786 - RNA, 18 nt, artificial
  Chemically synthesized
ugaugugcaagaguccau

SEQ ID NO: 787 - RNA, 18 nt, artificial
  Chemically synthesized
cacugugcauuccucaca

SEQ ID NO: 788 - RNA, 18 nt, artificial
  Chemically synthesized
ggugcacagcccuggcuc

SEQ ID NO: 789 - RNA, 18 nt, artificial
  Chemically synthesized
aggcuaucugggaccgca

SEQ ID NO: 790 - RNA, 18 nt, artificial
  Chemically synthesized
agaugggagugggaacag

SEQ ID NO: 791 - RNA, 18 nt, artificial
  Chemically synthesized
acaggaugccagaagcca

SEQ ID NO: 792 - RNA, 18 nt, artificial
  Chemically synthesized
gaccuguggaaguauccg

SEQ ID NO: 793 - RNA, 18 nt, artificial
  Chemically synthesized
aacaggguggacacugug

SEQ ID NO: 794 - RNA, 18 nt, artificial
  Chemically synthesized
ggaaacacugugcauucc

SEQ ID NO: 795 - RNA, 18 nt, artificial
  Chemically synthesized
ccaggugcacagcccugg

SEQ ID NO: 796 - RNA, 18 nt, artificial
  Chemically synthesized
cuaucugggaccgcaggg

SEQ ID NO: 797 - RNA, 18 nt, artificial
  Chemically synthesized
ugggacacaggugcaggc

SEQ ID NO: 798 - RNA, 18 nt, artificial
  Chemically synthesized
gcaaugagugccacucug

SEQ ID NO: 799 - RNA, 18 nt, artificial
  Chemically synthesized
ugcagguagugaugugca

SEQ ID NO: 800 - RNA, 18 nt, artificial
  Chemically synthesized
gguggucugguugacuuc

SEQ ID NO: 801 - RNA, 18 nt, artificial
  Chemically synthesized
uaucugggaccgcaggga

SEQ ID NO: 802 - RNA, 18 nt, artificial
  Chemically synthesized
caagcaaugagugccacu

SEQ ID NO: 803 - RNA, 18 nt, artificial
  Chemically synthesized
acaagcaaugagugccac

SEQ ID NO: 804 - RNA, 18 nt, artificial
  Chemically synthesized
acuccgggcaggauucag

SEQ ID NO: 805 - RNA, 18 nt, artificial
  Chemically synthesized
gugggacacaggugcagg

SEQ ID NO: 806 - RNA, 18 nt, artificial
  Chemically synthesized
cuggcucccgaggcaggc

SEQ ID NO: 807 - RNA, 18 nt, artificial
  Chemically synthesized
ggaugucagcggcauccc

SEQ ID NO: 808 - RNA, 18 nt, artificial
  Chemically synthesized
gcagggacugccaggugc

SEQ ID NO: 809 - RNA, 18 nt, artificial
  Chemically synthesized
gccacagcaacaacagga

SEQ ID NO: 810 - RNA, 18 nt, artificial
  Chemically synthesized
ccuguggaaguauccgca

SEQ ID NO: 811 - RNA, 18 nt, artificial
  Chemically synthesized
ccuuuauacaucuugguc

SEQ ID NO: 812 - RNA, 18 nt, artificial
  Chemically synthesized
uuccucacagccaacagu

SEQ ID NO: 813 - RNA, 18 nt, artificial
  Chemically synthesized
ugcaguuuuccagcaaug

SEQ ID NO: 814 - RNA, 18 nt, artificial
  Chemically synthesized
gacuggaagcccuuuuca

SEQ ID NO: 815 - RNA, 18 nt, artificial
  Chemically synthesized
aacuuggcccugaugacg

SEQ ID NO: 816 - RNA, 18 nt, artificial
  Chemically synthesized
acuccucgcugcgguugu

SEQ ID NO: 817 - RNA, 18 nt, artificial
  Chemically synthesized
gugggaacaggguggaca

SEQ ID NO: 818 - RNA, 18 nt, artificial
  Chemically synthesized
accgcagggacugccagg

SEQ ID NO: 819 - RNA, 18 nt, artificial
  Chemically synthesized
gacacugugcaggcuuca

SEQ ID NO: 820 - RNA, 18 nt, artificial
  Chemically synthesized
gauucaggcuaucuggga

SEQ ID NO: 821 - RNA, 18 nt, artificial
  Chemically synthesized
cugagcuaagcucaggcu

SEQ ID NO: 822 - RNA, 18 nt, artificial
  Chemically synthesized
acaaaacugcagguagug

SEQ ID NO: 823 - RNA, 18 nt, artificial
  Chemically synthesized
aggguggacacugugcag

SEQ ID NO: 824 - RNA, 18 nt, artificial
  Chemically synthesized
acagcccuggcucccgag

SEQ ID NO: 825 - RNA, 18 nt, artificial
  Chemically synthesized
aggugcacagcccuggcu

SEQ ID NO: 826 - RNA, 18 nt, artificial
  Chemically synthesized
gcagacacucuccauggc

SEQ ID NO: 827 - RNA, 18 nt, artificial
  Chemically synthesized
ugccaggugcacagcccu

SEQ ID NO: 828 - RNA, 18 nt, artificial
  Chemically synthesized
cggcgcugagcuaagcuc

SEQ ID NO: 829 - RNA, 18 nt, artificial
  Chemically synthesized
aagcccuuuucagagccu

SEQ ID NO: 830 - RNA, 18 nt, artificial
  Chemically synthesized
aacugcagguagugaugu

SEQ ID NO: 831 - RNA, 18 nt, artificial
  Chemically synthesized
aaacuccucgcugcgguu

SEQ ID NO: 832 - RNA, 18 nt, Artificial Sequence
  Chemically synthesized
agagccuuggaggagcug

SEQ ID NO: 833 - RNA, 18 nt, artificial
  Chemically synthesized
accuggcagucccugcgg

SEQ ID NO: 834 - RNA, 18 nt, artificial
  Chemically synthesized
caaccgcagcgaggaguu

SEQ ID NO: 835 - RNA, 18 nt, artificial
  Chemically synthesized
augcacaguguuucccug

SEQ ID NO: 836 - RNA, 18 nt, artificial
  Chemically synthesized
gaccaccuuauaccagcg

SEQ ID NO: 837 - RNA, 18 nt, artificial
  Chemically synthesized
uuaugagaucaagaugac

SEQ ID NO: 838 - RNA, 18 nt, artificial
  Chemically synthesized
uauaccagcguuaugaga

SEQ ID NO: 839 - RNA, 18 nt, artificial
  Chemically synthesized
ccgcagggacugccaggu

SEQ ID NO: 840 - RNA, 18 nt, artificial
  Chemically synthesized
aacuccucgcugcgguug

SEQ ID NO: 841 - RNA, 18 nt, artificial
  Chemically synthesized
cagggaaacacugugcau

SEQ ID NO: 842 - RNA, 18 nt, artificial
  Chemically synthesized
cgcugguauaaggugguc

SEQ ID NO: 843 - RNA, 18 nt, artificial
  Chemically synthesized
gucaucuugaucucauaa

SEQ ID NO: 844 - RNA, 18 nt, Artificial Sequence
  Chemically synthesized
ucucauaacgcugguaua

SEQ ID NO: 845 - RNA, 19 nt, artificial
  Chemically synthesized
gcguuaugagaucaagaua

SEQ ID NO: 846 - RNA, 19 nt, artificial
  Chemically synthesized
cagaccaccuuauaccaga

SEQ ID NO: 847 - RNA, 19 nt, artificial
  Chemically synthesized
gcacaguguuucccuguua

SEQ ID NO: 848 - RNA, 19 nt, artificial
  Chemically synthesized
cagcgaggaguuucucaua

SEQ ID NO: 849 - RNA, 19 nt, artificial
  Chemically synthesized
auaccagcguuaugagaua

SEQ ID NO: 850 - RNA, 19 nt, artificial
  Chemically synthesized
ugcacaguguuucccugua

SEQ ID NO: 851 - RNA, 19 nt, artificial
  Chemically synthesized
caccuuauaccagcguuaa

SEQ ID NO: 852 - RNA, 19 nt, artificial
  Chemically synthesized
accuuauaccagcguuaua

SEQ ID NO: 853 - RNA, 19 nt, artificial
  Chemically synthesized
cuuauaccagcguuaugaa

SEQ ID NO: 854 - RNA, 19 nt, artificial
  Chemically synthesized
ccgcagcgaggaguuucua

SEQ ID NO: 855 - RNA, 19 nt, artificial
  Chemically synthesized
accgcagcgaggaguuuca

SEQ ID NO: 856 - RNA, 19 nt, artificial
  Chemically synthesized
accaccuuauaccagcgua

SEQ ID NO: 857 - RNA, 19 nt, artificial
  Chemically synthesized
aaccgcagcgaggaguuua

SEQ ID NO: 858 - RNA, 19 nt, artificial
  Chemically synthesized
uauaccagcguuaugagaa

SEQ ID NO: 859 - RNA, 19 nt, artificial
  Chemically synthesized
agaucaagaugaccaagaa

SEQ ID NO: 860 - RNA, 19 nt, artificial
  Chemically synthesized
ccugcaaacugcagaguga

SEQ ID NO: 861 - RNA, 19 nt, artificial
  Chemically synthesized
cccugcaaacugcagagua

SEQ ID NO: 862 - RNA, 19 nt, artificial
  Chemically synthesized
gaucaagaugaccaagaua

SEQ ID NO: 863 - RNA, 19 nt, artificial
  Chemically synthesized
gucaucagggccaaguuca

SEQ ID NO: 864 - RNA, 19 nt, artificial
  Chemically synthesized
ccugcaccugugucccaca

SEQ ID NO: 865 - RNA, 19 nt, artificial
  Chemically synthesized
gggcuucaccaagaccuaa

SEQ ID NO: 866 - RNA, 19 nt, artificial
  Chemically synthesized
cgucaucagggccaaguua

SEQ ID NO: 867 - RNA, 19 nt, artificial
  Chemically synthesized
cacucauugcuuguggaca

SEQ ID NO: 868 - RNA, 19 nt, artificial
  Chemically synthesized
caguguuucccuguuuaua

SEQ ID NO: 869 - RNA, 19 nt, artificial
  Chemically synthesized
acaguguuucccuguuuaa

SEQ ID NO: 870 - RNA, 19 nt, artificial
  Chemically synthesized
aguguuucccuguuuauca

SEQ ID NO: 871 - RNA, 19 nt, artificial
  Chemically synthesized
caucuuucuuccggacaaa

SEQ ID NO: 872 - RNA, 19 nt, artificial
  Chemically synthesized
ccagauagccugaauccua

SEQ ID NO: 873 - RNA, 19 nt, artificial
  Chemically synthesized
ggucccagauagccugaaa

SEQ ID NO: 874 - RNA, 19 nt, artificial
  Chemically synthesized
ggagagugucugcggauaa

SEQ ID NO: 875 - RNA, 19 nt, artificial
  Chemically synthesized
ccgccauggagagugucua

SEQ ID NO: 876 - RNA, 19 nt, artificial
  Chemically synthesized
gagugucugcggauacuua

SEQ ID NO: 877 - RNA, 19 nt, artificial
  Chemically synthesized
gaguggcacucauugcuua

SEQ ID NO: 878 - RNA, 19 nt, artificial
  Chemically synthesized
gaguggaagcugaagccua

SEQ ID NO: 879 - RNA, 19 nt, artificial
  Chemically synthesized
cccuguucccacucccaua

SEQ ID NO: 880 - RNA, 19 nt, artificial
  Chemically synthesized
gcggauacuuccacaggua

SEQ ID NO: 881 - RNA, 19 nt, artificial
  Chemically synthesized
gagagugucugcggauaca

SEQ ID NO: 882 - RNA, 19 nt, artificial
  Chemically synthesized
ggaacagccugagcuuaga

SEQ ID NO: 883 - RNA, 19 nt, artificial
  Chemically synthesized
caaccagaccaccuuauaa

SEQ ID NO: 884 - RNA, 19 nt, artificial
  Chemically synthesized
gaggaaugcacaguguuua

SEQ ID NO: 885 - RNA, 19 nt, artificial
  Chemically synthesized
ccaagauguauaaagggua

SEQ ID NO: 886 - RNA, 19 nt, artificial
  Chemically synthesized
caccagaagucaaccagaa

SEQ ID NO: 887 - RNA, 19 nt, artificial
  Chemically synthesized
cagaagucaaccagaccaa

SEQ ID NO: 888 - RNA, 19 nt, artificial
  Chemically synthesized
cccacucccaucuuucuua

SEQ ID NO: 889 - RNA, 19 nt, artificial
  Chemically synthesized
gcgaggaguuucucauuga

SEQ ID NO: 890 - RNA, 19 nt, artificial
  Chemically synthesized
cugcagaguggcacucaua

SEQ ID NO: 891 - RNA, 19 nt, artificial
  Chemically synthesized
gaagcugaagccugcacaa

SEQ ID NO: 892 - RNA, 19 nt, artificial
  Chemically synthesized
ccuggaacagccugagcua

SEQ ID NO: 893 - RNA, 19 nt, artificial
  Chemically synthesized
gcauccuguuguugcugua

SEQ ID NO: 894 - RNA, 19 nt, artificial
  Chemically synthesized
gucccagauagccugaaua

SEQ ID NO: 895 - RNA, 19 nt, artificial
  Chemically synthesized
ggcugugaggaaugcacaa

SEQ ID NO: 896 - RNA, 19 nt, artificial
  Chemically synthesized
ggccuucugcaauuccgaa

SEQ ID NO: 897 - RNA, 19 nt, artificial
  Chemically synthesized
gcagaguggcacucauuga

SEQ ID NO: 898 - RNA, 19 nt, artificial
  Chemically synthesized
cagauagccugaauccuga

SEQ ID NO: 899 - RNA, 19 nt, artificial
  Chemically synthesized
ccggaguggaagcugaaga

SEQ ID NO: 900 - RNA, 19 nt, artificial
  Chemically synthesized
ggcugugcaccuggcagua

SEQ ID NO: 901 - RNA, 19 nt, artificial
  Chemically synthesized
gucaaccagaccaccuuaa

SEQ ID NO: 902 - RNA, 19 nt, artificial
  Chemically synthesized
ccauggagagugucugcga

SEQ ID NO: 903 - RNA, 19 nt, artificial
  Chemically synthesized
cuggcauccuguuguugca

SEQ ID NO: 904 - RNA, 19 nt, artificial
  Chemically synthesized
acugcagaguggcacucaa

SEQ ID NO: 905 - RNA, 19 nt, artificial
  Chemically synthesized
cggaguggaagcugaagca

SEQ ID NO: 906 - RNA, 19 nt, artificial
  Chemically synthesized
ccagaccaccuuauaccaa

SEQ ID NO: 907 - RNA, 19 nt, artificial
  Chemically synthesized
gcuggaaaacugcaggaua

SEQ ID NO: 908 - RNA, 19 nt, artificial
  Chemically synthesized
ccugaauccugcccggaga

SEQ ID NO: 909 - RNA, 19 nt, artificial
  Chemically synthesized
cugaagccugcacagugua

SEQ ID NO: 910 - RNA, 19 nt, artificial
  Chemically synthesized
cuggaaaacugcaggauga

SEQ ID NO: 911 - RNA, 19 nt, artificial
  Chemically synthesized
ucucauugcuggaaaacua

SEQ ID NO: 912 - RNA, 19 nt, artificial
  Chemically synthesized
agaccuacacuguuggcua

SEQ ID NO: 913 - RNA, 19 nt, artificial
  Chemically synthesized
gggacaccagaagucaaca

SEQ ID NO: 914 - RNA, 19 nt, artificial
  Chemically synthesized
ggcucccuggaacagccua

SEQ ID NO: 915 - RNA, 19 nt, artificial
  Chemically synthesized
guucccacucccaucuuua

SEQ ID NO: 916 - RNA, 19 nt, artificial
  Chemically synthesized
ggcuucuggcauccuguua

SEQ ID NO: 917 - RNA, 19 nt, artificial
  Chemically synthesized
cuucuggcauccuguugua

SEQ ID NO: 918 - RNA, 19 nt, artificial
  Chemically synthesized
agagugucugcggauacua

SEQ ID NO: 919 - RNA, 19 nt, artificial
  Chemically synthesized
caccaagaccuacacugua

SEQ ID NO: 920 - RNA, 19 nt, artificial
  Chemically synthesized
gggagccagggcugugcaa

SEQ ID NO: 921 - RNA, 19 nt, artificial
  Chemically synthesized
ugcagaguggcacucauua

SEQ ID NO: 922 - RNA, 19 nt, artificial
  Chemically synthesized
gugaggaaugcacagugua

SEQ ID NO: 923 - RNA, 19 nt, artificial
  Chemically synthesized
agcgaggaguuucucauua

SEQ ID NO: 924 - RNA, 19 nt, artificial
  Chemically synthesized
gggcugugcaccuggcaga

SEQ ID NO: 925 - RNA, 19 nt, artificial
  Chemically synthesized
uguuguugcuguggcugaa

SEQ ID NO: 926 - RNA, 19 nt, artificial
  Chemically synthesized
uaucuugaucucauaacgc

SEQ ID NO: 927 - RNA, 19 nt, artificial
  Chemically synthesized
ucugguauaagguggucug

SEQ ID NO: 928 - RNA, 19 nt, artificial
  Chemically synthesized
uaacagggaaacacugugc

SEQ ID NO: 929 - RNA, 19 nt, artificial
  Chemically synthesized
uaugagaaacuccucgcug

SEQ ID NO: 930 - RNA, 19 nt, artificial
  Chemically synthesized
uaucucauaacgcugguau

SEQ ID NO: 931 - RNA, 19 nt, artificial
  Chemically synthesized
uacagggaaacacugugca

SEQ ID NO: 932 - RNA, 19 nt, artificial
  Chemically synthesized
uuaacgcugguauaaggug

SEQ ID NO: 933 - RNA, 19 nt, artificial
  Chemically synthesized
uauaacgcugguauaaggu

SEQ ID NO: 934 - RNA, 19 nt, artificial
  Chemically synthesized
uucauaacgcugguauaag

SEQ ID NO: 935 - RNA, 19 nt, artificial
  Chemically synthesized
uagaaacuccucgcugcgg

SEQ ID NO: 936 - RNA, 19 nt, artificial
  Chemically synthesized
ugaaacuccucgcugcggu

SEQ ID NO: 937 - RNA, 19 nt, artificial
  Chemically synthesized
uacgcugguauaagguggu

SEQ ID NO: 938 - RNA, 19 nt, artificial
  Chemically synthesized
uaaacuccucgcugcgguu

SEQ ID NO: 939 - RNA, 19 nt, artificial
  Chemically synthesized
uucucauaacgcugguaua

SEQ ID NO: 940 - RNA, 19 nt, artificial
  Chemically synthesized
uucuuggucaucuugaucu

SEQ ID NO: 941 - RNA, 19 nt, artificial
  Chemically synthesized
ucacucugcaguuugcagg

SEQ ID NO: 942 - RNA, 19 nt, artificial
  Chemically synthesized
uacucugcaguuugcaggg

SEQ ID NO: 943 - RNA, 19 nt, artificial
  Chemically synthesized
uaucuuggucaucuugauc

SEQ ID NO: 944 - RNA, 19 nt, artificial
  Chemically synthesized
ugaacuuggcccugaugac

SEQ ID NO: 945 - RNA, 19 nt, artificial
  Chemically synthesized
ugugggacacaggugcagg

SEQ ID NO: 946 - RNA, 19 nt, artificial
  Chemically synthesized
uuaggucuuggugaagccc

SEQ ID NO: 947 - RNA, 19 nt, artificial
  Chemically synthesized
uaacuuggcccugaugacg

SEQ ID NO: 948 - RNA, 19 nt, artificial
  Chemically synthesized
uguccacaagcaaugagug

SEQ ID NO: 949 - RNA, 19 nt, artificial
  Chemically synthesized
uauaaacagggaaacacug

SEQ ID NO: 950 - RNA, 19 nt, artificial
  Chemically synthesized
uuaaacagggaaacacugu

SEQ ID NO: 951 - RNA, 19 nt, artificial
  Chemically synthesized
ugauaaacagggaaacacu

SEQ ID NO: 952 - RNA, 19 nt, artificial
  Chemically synthesized
uuuguccggaagaaagaug

SEQ ID NO: 953 - RNA, 19 nt, artificial
  Chemically synthesized
uaggauucaggcuaucugg

SEQ ID NO: 954 - RNA, 19 nt, artificial
  Chemically synthesized
uuucaggcuaucugggacc

SEQ ID NO: 955 - RNA, 19 nt, artificial
  Chemically synthesized
uuauccgcagacacucucc

SEQ ID NO: 956 - RNA, 19 nt, artificial
  Chemically synthesized
uagacacucuccauggcgg

SEQ ID NO: 957 - RNA, 19 nt, artificial
  Chemically synthesized
uaaguauccgcagacacuc

SEQ ID NO: 958 - RNA, 19 nt, artificial
  Chemically synthesized
uaagcaaugagugccacuc

SEQ ID NO: 959 - RNA, 19 nt, artificial
  Chemically synthesized
uaggcuucagcuuccacuc

SEQ ID NO: 960 - RNA, 19 nt, artificial
  Chemically synthesized
uaugggagugggaacaggg

SEQ ID NO: 961 - RNA, 19 nt, artificial
  Chemically synthesized
uaccuguggaaguauccgc

SEQ ID NO: 962 - RNA, 19 nt, artificial
  Chemically synthesized
uguauccgcagacacucuc

SEQ ID NO: 963 - RNA, 19 nt, artificial
  Chemically synthesized
ucuaagcucaggcuguucc

SEQ ID NO: 964 - RNA, 19 nt, artificial
  Chemically synthesized
uuauaagguggucugguug

SEQ ID NO: 965 - RNA, 19 nt, artificial
  Chemically synthesized
uaaacacugugcauuccuc

SEQ ID NO: 966 - RNA, 19 nt, artificial
  Chemically synthesized
uacccuuuauacaucuugg

SEQ ID NO: 967 - RNA, 19 nt, artificial
  Chemically synthesized
uucugguugacuucuggug

SEQ ID NO: 968 - RNA, 19 nt, artificial
  Chemically synthesized
uuggucugguugacuucug

SEQ ID NO: 969 - RNA, 19 nt, artificial
  Chemically synthesized
uaagaaagaugggaguggg

SEQ ID NO: 970 - RNA, 19 nt, artificial
  Chemically synthesized
ucaaugagaaacuccucgc

SEQ ID NO: 971 - RNA, 19 nt, artificial
  Chemically synthesized
uaugagugccacucugcag

SEQ ID NO: 972 - RNA, 19 nt, artificial
  Chemically synthesized
uugugcaggcuucagcuuc

SEQ ID NO: 973 - RNA, 19 nt, artificial
  Chemically synthesized
uagcucaggcuguuccagg

SEQ ID NO: 974 - RNA, 19 nt, artificial
  Chemically synthesized
uacagcaacaacaggaugc

SEQ ID NO: 975 - RNA, 19 nt, artificial
  Chemically synthesized
uauucaggcuaucugggac

SEQ ID NO: 976 - RNA, 19 nt, artificial
  Chemically synthesized
uugugcauuccucacagcc

SEQ ID NO: 977 - RNA, 19 nt, artificial
  Chemically synthesized
uucggaauugcagaaggcc

SEQ ID NO: 978 - RNA, 19 nt, artificial
  Chemically synthesized
ucaaugagugccacucugc

SEQ ID NO: 979 - RNA, 19 nt, artificial
  Chemically synthesized
ucaggauucaggcuaucug

SEQ ID NO: 980 - RNA, 19 nt, artificial
  Chemically synthesized
ucuucagcuuccacuccgg

SEQ ID NO: 981 - RNA, 19 nt, artificial
  Chemically synthesized
uacugccaggugcacagcc

SEQ ID NO: 982 - RNA, 19 nt, artificial
  Chemically synthesized
uuaagguggucugguugac

SEQ ID NO: 983 - RNA, 19 nt, artificial
  Chemically synthesized
ucgcagacacucuccaugg

SEQ ID NO: 984 - RNA, 19 nt, artificial
  Chemically synthesized
ugcaacaacaggaugccag

SEQ ID NO: 985 - RNA, 19 nt, artificial
  Chemically synthesized
uugagugccacucugcagu

SEQ ID NO: 986 - RNA, 19 nt, artificial
  Chemically synthesized
ugcuucagcuuccacuccg

SEQ ID NO: 987 - RNA, 19 nt, artificial
  Chemically synthesized
uugguauaagguggucugg

SEQ ID NO: 988 - RNA, 19 nt, artificial
  Chemically synthesized
uauccugcaguuuuccagc

SEQ ID NO: 989 - RNA, 19 nt, artificial
  Chemically synthesized
ucuccgggcaggauucagg

SEQ ID NO: 990 - RNA, 19 nt, artificial
  Chemically synthesized
uacacugugcaggcuucag

SEQ ID NO: 991 - RNA, 19 nt, artificial
  Chemically synthesized
ucauccugcaguuuuccag

SEQ ID NO: 992 - RNA, 19 nt, artificial
  Chemically synthesized
uaguuuuccagcaaugaga

SEQ ID NO: 993 - RNA, 19 nt, artificial
  Chemically synthesized
uagccaacaguguaggucu

SEQ ID NO: 994 - RNA, 19 nt, artificial
  Chemically synthesized
uguugacuucugguguccc

SEQ ID NO: 995 - RNA, 19 nt, artificial
  Chemically synthesized
uaggcuguuccagggagcc

SEQ ID NO: 996 - RNA, 19 nt, artificial
  Chemically synthesized
uaaagaugggagugggaac

SEQ ID NO: 997 - RNA, 19 nt, artificial
  Chemically synthesized
uaacaggaugccagaagcc

SEQ ID NO: 998 - RNA, 19 nt, artificial
  Chemically synthesized
uacaacaggaugccagaag

SEQ ID NO: 999 - RNA, 19 nt, artificial
  Chemically synthesized
uaguauccgcagacacucu

SEQ ID NO: 1000 - RNA, 19 nt, artificial
  Chemically synthesized
uacaguguaggucuuggug

SEQ ID NO: 1001 - RNA, 19 nt, artificial
  Chemically synthesized
uugcacagcccuggcuccc

SEQ ID NO: 1002 - RNA, 19 nt, artificial
  Chemically synthesized
uaaugagugccacucugca

SEQ ID NO: 1003 - RNA, 19 nt, artificial
  Chemically synthesized
uacacugugcauuccucac

SEQ ID NO: 1004 - RNA, 19 nt, artificial
  Chemically synthesized
uaaugagaaacuccucgcu

SEQ ID NO: 1005 - RNA, 19 nt, artificial
  Chemically synthesized
ucugccaggugcacagccc

SEQ ID NO: 1006 - RNA, 19 nt, Artificial Sequence
  Chemically synthesized
uucagccacagcaacaaca

SEQ ID NO: 1007 - RNA, 19 nt, artificial
  Chemically synthesized
ggaagaacuuucucgguaa

SEQ ID NO: 1008 - RNA, 19 nt, artificial
  Chemically synthesized
gguucuccaguucaaauua

SEQ ID NO: 1009 - RNA, 19 nt, artificial
  Chemically synthesized
cuguguuuaugcuggaaua

SEQ ID NO: 1010 - RNA, 19 nt, artificial
  Chemically synthesized
ccuguauggugauaucaua

SEQ ID NO: 1011 - RNA, 19 nt, artificial
  Chemically synthesized
ggcacauuauguaaacaua

SEQ ID NO: 1012 - RNA, 19 nt, artificial
  Chemically synthesized
ggugaauucucagaugaua

SEQ ID NO: 1013 - RNA, 19 nt, artificial
  Chemically synthesized
ccaugugauuucaguauau

SEQ ID NO: 1014 - RNA, 19 nt, artificial
  Chemically synthesized
cucugagccuuguagaaau

SEQ ID NO: 1015 - RNA, 19 nt, artificial
  Chemically synthesized
ggcugcgagugcaagauca

SEQ ID NO: 1016 - RNA, 19 nt, artificial
  Chemically synthesized
agaggaagccgcucaaaua

SEQ ID NO: 1017 - RNA, 19 nt, artificial
  Chemically synthesized
cuuugguucuccaguucaa

SEQ ID NO: 1018 - RNA, 19 nt, artificial
  Chemically synthesized
caguaugagaucaagcaga

SEQ ID NO: 1019 - RNA, 19 nt, artificial
  Chemically synthesized
cuugcaaaaugcuuccaaa

SEQ ID NO: 1020 - RNA, 19 nt, artificial
  Chemically synthesized
cuugguagguauuagacuu

SEQ ID NO: 1021 - RNA, 19 nt, artificial
  Chemically synthesized
cccucugagccuuguagaa

SEQ ID NO: 1022 - RNA, 19 nt, artificial
  Chemically synthesized
gguagguauuagacuugca

SEQ ID NO: 1023 - RNA, 19 nt, artificial
  Chemically synthesized
gggucacagagaagaacau

SEQ ID NO: 1024 - RNA, 19 nt, artificial
  Chemically synthesized
gaaccugaguugcagauau

SEQ ID NO: 1025 - RNA, 19 nt, artificial
  Chemically synthesized
ggauugaguugcacagcuu

SEQ ID NO: 1026 - RNA, 19 nt, artificial
  Chemically synthesized
ggugauaucauauguaaca

SEQ ID NO: 1027 - RNA, 19 nt, artificial
  Chemically synthesized
ccugcaagcaacucaaaau

SEQ ID NO: 1028 - RNA, 19 nt, artificial
  Chemically synthesized
ggauauagaguuuaucuac

SEQ ID NO: 1029 - RNA, 19 nt, artificial
  Chemically synthesized
gaugcuuuguaucauucuu

SEQ ID NO: 1030 - RNA, 19 nt, artificial
  Chemically synthesized
gcaagcaacucaaaauauu

SEQ ID NO: 1031 - RNA, 19 nt, artificial
  Chemically synthesized
cgucuuugguucuccaguu

SEQ ID NO: 1032 - RNA, 19 nt, artificial
  Chemically synthesized
ccuuuauauuugauccaca

SEQ ID NO: 1033 - RNA, 19 nt, artificial
  Chemically synthesized
gugcugagcagaaaacaaa

SEQ ID NO: 1034 - RNA, 19 nt, artificial
  Chemically synthesized
ccaacuucugcuuguauuu

SEQ ID NO: 1035 - RNA, 19 nt, artificial
  Chemically synthesized
ccuauuaauccucagaauu

SEQ ID NO: 1036 - RNA, 19 nt, artificial
  Chemically synthesized
cgguaaugauaaggagaau

SEQ ID NO: 1037 - RNA, 19 nt, artificial
  Chemically synthesized
cgcucaaauaccuucacaa

SEQ ID NO: 1038 - RNA, 19 nt, artificial
  Chemically synthesized
gggcagacugggaggguau

SEQ ID NO: 1039 - RNA, 19 nt, artificial
  Chemically synthesized
ugcugagcagaaaacaaaa

SEQ ID NO: 1040 - RNA, 19 nt, artificial
  Chemically synthesized
agcggucagugagaaggaa

SEQ ID NO: 1041 - RNA, 19 nt, artificial
  Chemically synthesized
gguauuagacuugcacuuu

SEQ ID NO: 1042 - RNA, 19 nt, artificial
  Chemically synthesized
gcuggaauaugaagucuga

SEQ ID NO: 1043 - RNA, 19 nt, artificial
  Chemically synthesized
ccuguguuguaaagauaaa

SEQ ID NO: 1044 - RNA, 19 nt, artificial
  Chemically synthesized
gguaagaugucauaaugga

SEQ ID NO: 1045 - RNA, 19 nt, artificial
  Chemically synthesized
gugguuuccugaagccagu

SEQ ID NO: 1046 - RNA, 19 nt, artificial
  Chemically synthesized
ggguccaaauuaauaugau

SEQ ID NO: 1047 - RNA, 19 nt, artificial
  Chemically synthesized
ggaacacacaagaguuguu

SEQ ID NO: 1048 - RNA, 19 nt, artificial
  Chemically synthesized
agauuaccuagcuaagaaa

SEQ ID NO: 1049 - RNA, 19 nt, artificial
  Chemically synthesized
cugggaacacacaagaguu

SEQ ID NO: 1050 - RNA, 19 nt, artificial
  Chemically synthesized
ucccauggguccaaauuaa

SEQ ID NO: 1051 - RNA, 19 nt, artificial
  Chemically synthesized
guucuccaguucaaauuau

SEQ ID NO: 1052 - RNA, 19 nt, artificial
  Chemically synthesized
ccauggguccaaauuaaua

SEQ ID NO: 1053 - RNA, 19 nt, artificial
  Chemically synthesized
ugggcguggucuugcaaaa

SEQ ID NO: 1054 - RNA, 19 nt, artificial
  Chemically synthesized
cgugcugagcagaaaacaa

SEQ ID NO: 1055 - RNA, 19 nt, artificial
  Chemically synthesized
cggucagugagaaggaagu

SEQ ID NO: 1056 - RNA, 19 nt, artificial
  Chemically synthesized
cgauauacaggcacauuau

SEQ ID NO: 1057 - RNA, 19 nt, artificial
  Chemically synthesized
gcauuuugcagaaacuuuu

SEQ ID NO: 1058 - RNA, 19 nt, artificial
  Chemically synthesized
ggaccaguccaugugauuu

SEQ ID NO: 1059 - RNA, 19 nt, artificial
  Chemically synthesized
gcucaaauaccuucacaau

SEQ ID NO: 1060 - RNA, 19 nt, artificial
  Chemically synthesized
caccuuagccuguucuauu

SEQ ID NO: 1061 - RNA, 19 nt, artificial
  Chemically synthesized
ggaucucccagcuggguua

SEQ ID NO: 1062 - RNA, 19 nt, artificial
  Chemically synthesized
guauuagacuugcacuuuu

SEQ ID NO: 1063 - RNA, 19 nt, artificial
  Chemically synthesized
agaggauccaguaugagau

SEQ ID NO: 1064 - RNA, 19 nt, artificial
  Chemically synthesized
gaaccuauguguucccuca

SEQ ID NO: 1065 - RNA, 19 nt, artificial
  Chemically synthesized
cugaguugcagauauacca

SEQ ID NO: 1066 - RNA, 19 nt, artificial
  Chemically synthesized
cucaaauaccuucacaaua

SEQ ID NO: 1067 - RNA, 19 nt, artificial
  Chemically synthesized
uccuauuaauccucagaau

SEQ ID NO: 1068 - RNA, 19 nt, artificial
  Chemically synthesized
ccaguucaaauuauugcaa

SEQ ID NO: 1069 - RNA, 19 nt, artificial
  Chemically synthesized
uguuuaugcuggaauauga

SEQ ID NO: 1070 - RNA, 19 nt, artificial
  Chemically synthesized
gcacagaucuugaugacuu

SEQ ID NO: 1071 - RNA, 19 nt, artificial
  Chemically synthesized
aaccugaguugcagauaua

SEQ ID NO: 1072 - RNA, 19 nt, artificial
  Chemically synthesized
cugcaagcaacucaaaaua

SEQ ID NO: 1073 - RNA, 19 nt, artificial
  Chemically synthesized
ggcuuuggugacacacuca

SEQ ID NO: 1074 - RNA, 19 nt, artificial
  Chemically synthesized
guugcaagacuguguagca

SEQ ID NO: 1075 - RNA, 19 nt, artificial
  Chemically synthesized
gacauuuauggcaacccua

SEQ ID NO: 1076 - RNA, 19 nt, artificial
  Chemically synthesized
guaugagaucaagcagaua

SEQ ID NO: 1077 - RNA, 19 nt, artificial
  Chemically synthesized
gacuugcugccguaauuua

SEQ ID NO: 1078 - RNA, 19 nt, artificial
  Chemically synthesized
gaaagaaggaauaucucau

SEQ ID NO: 1079 - RNA, 19 nt, artificial
  Chemically synthesized
gaggaaagaaggaauaucu

SEQ ID NO: 1080 - RNA, 19 nt, artificial
  Chemically synthesized
cguggacaauaaacaguau

SEQ ID NO: 1081 - RNA, 19 nt, artificial
  Chemically synthesized
ggugaaccugaguugcaga

SEQ ID NO: 1082 - RNA, 19 nt, artificial
  Chemically synthesized
ccugcaucaagagaaguga

SEQ ID NO: 1083 - RNA, 19 nt, artificial
  Chemically synthesized
aguccaugugauuucagua

SEQ ID NO: 1084 - RNA, 19 nt, artificial
  Chemically synthesized
aguaaaggaucuuugagua

SEQ ID NO: 1085 - RNA, 19 nt, artificial
  Chemically synthesized
cccagaagaagagccugaa

SEQ ID NO: 1086 - RNA, 19 nt, artificial
  Chemically synthesized
gacaucagcuguaaucauu

SEQ ID NO: 1087 - RNA, 19 nt, artificial
  Chemically synthesized
ccucaaagacugacagcca

SEQ ID NO: 1088 - RNA, 19 nt, artificial
  Chemically synthesized
cucgguccguggacaauaa

SEQ ID NO: 1089 - RNA, 19 nt, artificial
  Chemically synthesized
agggcagccuggaaccagu

SEQ ID NO: 1090 - RNA, 19 nt, artificial
  Chemically synthesized
ccguggacaauaaacagua

SEQ ID NO: 1091 - RNA, 19 nt, artificial
  Chemically synthesized
gaaacgacauuuauggcaa

SEQ ID NO: 1092 - RNA, 19 nt, artificial
  Chemically synthesized
ccucagaauuccaguggga

SEQ ID NO: 1093 - RNA, 19 nt, artificial
  Chemically synthesized
gucacagagaagaacauca

SEQ ID NO: 1094 - RNA, 19 nt, artificial
  Chemically synthesized
ccaguggcuaguucuugaa

SEQ ID NO: 1095 - RNA, 19 nt, artificial
  Chemically synthesized
ggaaccaguggcuaguucu

SEQ ID NO: 1096 - RNA, 19 nt, artificial
  Chemically synthesized
uccaugugauuucaguaua

SEQ ID NO: 1097 - RNA, 19 nt, artificial
  Chemically synthesized
agguauuagacuugcacuu

SEQ ID NO: 1098 - RNA, 19 nt, artificial
  Chemically synthesized
cauuugacccagaguggaa

SEQ ID NO: 1099 - RNA, 19 nt, artificial
  Chemically synthesized
gcaccuggauugaguugca

SEQ ID NO: 1100 - RNA, 19 nt, artificial
  Chemically synthesized
aguuguugaaaguugacaa

SEQ ID NO: 1101 - RNA, 19 nt, artificial
  Chemically synthesized
guggccaacugcaaaaaaa

SEQ ID NO: 1102 - RNA, 19 nt, artificial
  Chemically synthesized
cucaaagacugacagccau

SEQ ID NO: 1103 - RNA, 19 nt, artificial
  Chemically synthesized
gccucagcugagucuuuuu

SEQ ID NO: 1104 - RNA, 19 nt, artificial
  Chemically synthesized
ugcuuuguaucauucuuga

SEQ ID NO: 1105 - RNA, 19 nt, artificial
  Chemically synthesized
guuuaagaaggcucuccau

SEQ ID NO: 1106 - RNA, 19 nt, artificial
  Chemically synthesized
ccagcuaagcauaguaaga

SEQ ID NO: 1107 - RNA, 19 nt, artificial
  Chemically synthesized
guugguaagaugucauaau

SEQ ID NO: 1108 - RNA, 19 nt, artificial
  Chemically synthesized
caccuguguuguaaagaua

SEQ ID NO: 1109 - RNA, 19 nt, artificial
  Chemically synthesized
cagccucagcugagucuuu

SEQ ID NO: 1110 - RNA, 19 nt, artificial
  Chemically synthesized
augagaucaagcagauaaa

SEQ ID NO: 1111 - RNA, 19 nt, artificial
  Chemically synthesized
guugcacagcuuugcuuua

SEQ ID NO: 1112 - RNA, 19 nt, artificial
  Chemically synthesized
guggcuaguucuugaagga

SEQ ID NO: 1113 - RNA, 19 nt, artificial
  Chemically synthesized
gauugaguugcacagcuuu

SEQ ID NO: 1114 - RNA, 19 nt, artificial
  Chemically synthesized
ggaucuuugaguagguucg

SEQ ID NO: 1115 - RNA, 19 nt, artificial
  Chemically synthesized
cgcuggacguuggaggaaa

SEQ ID NO: 1116 - RNA, 19 nt, artificial
  Chemically synthesized
cacacacguuggucuuuua

SEQ ID NO: 1117 - RNA, 19 nt, artificial
  Chemically synthesized
cucagugugguuuccugaa

SEQ ID NO: 1118 - RNA, 19 nt, artificial
  Chemically synthesized
auguuauguucuaagcaca

SEQ ID NO: 1119 - RNA, 19 nt, artificial
  Chemically synthesized
gccaccuuagccuguucua

SEQ ID NO: 1120 - RNA, 19 nt, artificial
  Chemically synthesized
aagaguuguugaaaguuga

SEQ ID NO: 1121 - RNA, 19 nt, artificial
  Chemically synthesized
ccugagaaggauauagagu

SEQ ID NO: 1122 - RNA, 19 nt, artificial
  Chemically synthesized
accaguggcuaguucuuga

SEQ ID NO: 1123 - RNA, 19 nt, artificial
  Chemically synthesized
cauccugcaagcaacucaa

SEQ ID NO: 1124 - RNA, 19 nt, artificial
  Chemically synthesized
guaaugauaaggagaaucu

SEQ ID NO: 1125 - RNA, 19 nt, artificial
  Chemically synthesized
ggaauaucucauugcagga

SEQ ID NO: 1126 - RNA, 19 nt, artificial
  Chemically synthesized
gggcguggucuugcaaaau

SEQ ID NO: 1127 - RNA, 19 nt, artificial
  Chemically synthesized
cauccugaggacagaaaaa

SEQ ID NO: 1128 - RNA, 19 nt, artificial
  Chemically synthesized
uggacuugcugccguaauu

SEQ ID NO: 1129 - RNA, 19 nt, artificial
  Chemically synthesized
gugacacacucacuucuuu

SEQ ID NO: 1130 - RNA, 19 nt, artificial
  Chemically synthesized
cuguuuuaagagacaucuu

SEQ ID NO: 1131 - RNA, 19 nt, artificial
  Chemically synthesized
guuuaugcuggaauaugaa

SEQ ID NO: 1132 - RNA, 19 nt, artificial
  Chemically synthesized
guccaugugauuucaguau

SEQ ID NO: 1133 - RNA, 19 nt, artificial
  Chemically synthesized
aggaguuucucgacaucga

SEQ ID NO: 1134 - RNA, 19 nt, artificial
  Chemically synthesized
gaagaacuuucucgguaau

SEQ ID NO: 1135 - RNA, 19 nt, artificial
  Chemically synthesized
gggucuggagggagacgug

SEQ ID NO: 1136 - RNA, 19 nt, artificial
  Chemically synthesized
ggaagccgcucaaauaccu

SEQ ID NO: 1137 - RNA, 19 nt, artificial
  Chemically synthesized
gguccguggacaauaaaca

SEQ ID NO: 1138 - RNA, 19 nt, artificial
  Chemically synthesized
cccuccaacccauauaaca

SEQ ID NO: 1139 - RNA, 19 nt, artificial
  Chemically synthesized
cccauggguccaaauuaau

SEQ ID NO: 1140 - RNA, 19 nt, artificial
  Chemically synthesized
cacacucacuucuuucuca

SEQ ID NO: 1141 - RNA, 19 nt, artificial
  Chemically synthesized
gcagaaaacaaaacagguu

SEQ ID NO: 1142 - RNA, 19 nt, artificial
  Chemically synthesized
caucaauccuauuaauccu

SEQ ID NO: 1143 - RNA, 19 nt, artificial
  Chemically synthesized
cacaauaaauaguggcaau

SEQ ID NO: 1144 - RNA, 19 nt, artificial
  Chemically synthesized
guuggaggaaagaaggaau

SEQ ID NO: 1145 - RNA, 19 nt, artificial
  Chemically synthesized
ggccuuuauauuugaucca

SEQ ID NO: 1146 - RNA, 19 nt, artificial
  Chemically synthesized
uguucaaagggccugagaa

SEQ ID NO: 1147 - RNA, 19 nt, artificial
  Chemically synthesized
acugggucacagagaagaa

SEQ ID NO: 1148 - RNA, 19 nt, artificial
  Chemically synthesized
gguaaugauaaggagaauc

SEQ ID NO: 1149 - RNA, 19 nt, artificial
  Chemically synthesized
cacacaagaguuguugaaa

SEQ ID NO: 1150 - RNA, 19 nt, artificial
  Chemically synthesized
cucuggauggacuggguca

SEQ ID NO: 1151 - RNA, 19 nt, artificial
  Chemically synthesized
ggaacuagggaaccuaugu

SEQ ID NO: 1152 - RNA, 19 nt, artificial
  Chemically synthesized
cucgguaaugauaaggaga

SEQ ID NO: 1153 - RNA, 19 nt, artificial
  Chemically synthesized
aggugaauucucagaugau

SEQ ID NO: 1154 - RNA, 19 nt, artificial
  Chemically synthesized
ucgguaaugauaaggagaa

SEQ ID NO: 1155 - RNA, 19 nt, artificial
  Chemically synthesized
gccaaagcggucagugaga

SEQ ID NO: 1156 - RNA, 19 nt, artificial
  Chemically synthesized
gaaccaguggcuaguucuu

SEQ ID NO: 1157 - RNA, 19 nt, artificial
  Chemically synthesized
cccuucuccuuuuagacau

SEQ ID NO: 1158 - RNA, 19 nt, artificial
  Chemically synthesized
ccaccuuagccuguucuau

SEQ ID NO: 1159 - RNA, 19 nt, artificial
  Chemically synthesized
cccugagcaccacccagaa

SEQ ID NO: 1160 - RNA, 19 nt, artificial
  Chemically synthesized
ugcuguacagugaccuaaa

SEQ ID NO: 1161 - RNA, 19 nt, artificial
  Chemically synthesized
ccuuagccuguucuauuca

SEQ ID NO: 1162 - RNA, 19 nt, artificial
  Chemically synthesized
gaacuuucucgguaaugau

SEQ ID NO: 1163 - RNA, 19 nt, artificial
  Chemically synthesized
ccuaggaagggaaggauuu

SEQ ID NO: 1164 - RNA, 19 nt, artificial
  Chemically synthesized
ucagugagaaggaagugga

SEQ ID NO: 1165 - RNA, 19 nt, artificial
  Chemically synthesized
auaugaagucugagaccuu

SEQ ID NO: 1166 - RNA, 19 nt, artificial
  Chemically synthesized
ggacucuggaaacgacauu

SEQ ID NO: 1167 - RNA, 19 nt, artificial
  Chemically synthesized
ccucugagccuuguagaaa

SEQ ID NO: 1168 - RNA, 19 nt, artificial
  Chemically synthesized
aguuuaagaaggcucucca

SEQ ID NO: 1169 - RNA, 19 nt, artificial
  Chemically synthesized
agggcagacugggagggua

SEQ ID NO: 1170 - RNA, 19 nt, artificial
  Chemically synthesized
guagaaaugggagcgagaa

SEQ ID NO: 1171 - RNA, 19 nt, artificial
  Chemically synthesized
ggacuugcugccguaauuu

SEQ ID NO: 1172 - RNA, 19 nt, artificial
  Chemically synthesized
agaacuuucucgguaauga

SEQ ID NO: 1173 - RNA, 19 nt, artificial
  Chemically synthesized
guaucauucuugagcaauc

SEQ ID NO: 1174 - RNA, 19 nt, artificial
  Chemically synthesized
cagcuaagcauaguaagaa

SEQ ID NO: 1175 - RNA, 19 nt, artificial
  Chemically synthesized
ggccuguuuuaagagacau

SEQ ID NO: 1176 - RNA, 19 nt, artificial
  Chemically synthesized
gacugggucacagagaaga

SEQ ID NO: 1177 - RNA, 19 nt, artificial
  Chemically synthesized
cucugaugcuuuguaucau

SEQ ID NO: 1178 - RNA, 19 nt, artificial
  Chemically synthesized
guaacauuuacuccuguuu

SEQ ID NO: 1179 - RNA, 19 nt, artificial
  Chemically synthesized
ugaguugcagauauaccaa

SEQ ID NO: 1180 - RNA, 19 nt, artificial
  Chemically synthesized
aucccauggguccaaauua

SEQ ID NO: 1181 - RNA, 19 nt, artificial
  Chemically synthesized
cucuggaaacgacauuuau

SEQ ID NO: 1182 - RNA, 19 nt, artificial
  Chemically synthesized
gauccaguaugagaucaag

SEQ ID NO: 1183 - RNA, 19 nt, artificial
  Chemically synthesized
agguguggccuuuauauuu

SEQ ID NO: 1184 - RNA, 19 nt, artificial
  Chemically synthesized
cccuguucgcuuccuguau

SEQ ID NO: 1185 - RNA, 19 nt, artificial
  Chemically synthesized
gggagacguggguccaagg

SEQ ID NO: 1186 - RNA, 19 nt, artificial
  Chemically synthesized
cauggguccaaauuaauau

SEQ ID NO: 1187 - RNA, 19 nt, artificial
  Chemically synthesized
ugggucacagagaagaaca

SEQ ID NO: 1188 - RNA, 19 nt, artificial
  Chemically synthesized
ccucaaggucccuucccua

SEQ ID NO: 1189 - RNA, 19 nt, artificial
  Chemically synthesized
ugguucuccaguucaaauu

SEQ ID NO: 1190 - RNA, 19 nt, artificial
  Chemically synthesized
ggaccuggucagcacagau

SEQ ID NO: 1191 - RNA, 19 nt, artificial
  Chemically synthesized
ggagggagacgugggucca

SEQ ID NO: 1192 - RNA, 19 nt, artificial
  Chemically synthesized
ucugaugcuuuguaucauu

SEQ ID NO: 1193 - RNA, 19 nt, artificial
  Chemically synthesized
gggacauggcccuuguuuu

SEQ ID NO: 1194 - RNA, 19 nt, artificial
  Chemically synthesized
gccugggcguggucuugca

SEQ ID NO: 1195 - RNA, 19 nt, artificial
  Chemically synthesized
ggcguuuugcaaugcagau

SEQ ID NO: 1196 - RNA, 19 nt, artificial
  Chemically synthesized
gaguagguucggucugaaa

SEQ ID NO: 1197 - RNA, 19 nt, artificial
  Chemically synthesized
aguucuucgccugcaucaa

SEQ ID NO: 1198 - RNA, 19 nt, artificial
  Chemically synthesized
acaaagauuaccuagcuaa

SEQ ID NO: 1199 - RNA, 19 nt, artificial
  Chemically synthesized
gagggagacguggguccaa

SEQ ID NO: 1200 - RNA, 19 nt, artificial
  Chemically synthesized
cuguuucugcugauuguuu

SEQ ID NO: 1201 - RNA, 19 nt, artificial
  Chemically synthesized
cugacgauauacaggcaca

SEQ ID NO: 1202 - RNA, 19 nt, artificial
  Chemically synthesized
uguugaaaguugacaagca

SEQ ID NO: 1203 - RNA, 19 nt, artificial
  Chemically synthesized
gccuaggaagggaaggauu

SEQ ID NO: 1204 - RNA, 19 nt, artificial
  Chemically synthesized
ggugacacacucacuucuu

SEQ ID NO: 1205 - RNA, 19 nt, artificial
  Chemically synthesized
gagccuuguagaaauggga

SEQ ID NO: 1206 - RNA, 19 nt, artificial
  Chemically synthesized
cagaaaacaaaacagguua

SEQ ID NO: 1207 - RNA, 19 nt, artificial
  Chemically synthesized
cgcaugucucugaugcuuu

SEQ ID NO: 1208 - RNA, 19 nt, artificial
  Chemically synthesized
gacaaagauuaccuagcua

SEQ ID NO: 1209 - RNA, 19 nt, artificial
  Chemically synthesized
cuguauggugauaucauau

SEQ ID NO: 1210 - RNA, 19 nt, artificial
  Chemically synthesized
gacucuggaaacgacauuu

SEQ ID NO: 1211 - RNA, 19 nt, artificial
  Chemically synthesized
gguucggucugaaaggugu

SEQ ID NO: 1212 - RNA, 19 nt, artificial
  Chemically synthesized
agaugauaggugaaccuga

SEQ ID NO: 1213 - RNA, 19 nt, artificial
  Chemically synthesized
gacacuauggccuguuuua

SEQ ID NO: 1214 - RNA, 19 nt, artificial
  Chemically synthesized
cugcaaaaaaagccuccaa

SEQ ID NO: 1215 - RNA, 19 nt, artificial
  Chemically synthesized
cuguucuauucagcggcaa

SEQ ID NO: 1216 - RNA, 19 nt, artificial
  Chemically synthesized
guggguccaagguccucau

SEQ ID NO: 1217 - RNA, 19 nt, artificial
  Chemically synthesized
gccugagaaggauauagag

SEQ ID NO: 1218 - RNA, 19 nt, artificial
  Chemically synthesized
gaaacuuccuagggaacua

SEQ ID NO: 1219 - RNA, 19 nt, artificial
  Chemically synthesized
cgccagcuaagcauaguaa

SEQ ID NO: 1220 - RNA, 19 nt, artificial
  Chemically synthesized
gccucuggauggacugggu

SEQ ID NO: 1221 - RNA, 19 nt, artificial
  Chemically synthesized
acgauauacaggcacauua

SEQ ID NO: 1222 - RNA, 19 nt, artificial
  Chemically synthesized
agcaccacccagaagaaga

SEQ ID NO: 1223 - RNA, 19 nt, artificial
  Chemically synthesized
ccucccucaaagacugaca

SEQ ID NO: 1224 - RNA, 19 nt, artificial
  Chemically synthesized
ggagcacuguguuuaugcu

SEQ ID NO: 1225 - RNA, 19 nt, artificial
  Chemically synthesized
acuugcugccguaauuuaa

SEQ ID NO: 1226 - RNA, 19 nt, artificial
  Chemically synthesized
gguuuccugaagccaguga

SEQ ID NO: 1227 - RNA, 19 nt, artificial
  Chemically synthesized
ggucagugagaaggaagug

SEQ ID NO: 1228 - RNA, 19 nt, artificial
  Chemically synthesized
gugacgccagcuaagcaua

SEQ ID NO: 1229 - RNA, 19 nt, artificial
  Chemically synthesized
augauaaggagaaucucuu

SEQ ID NO: 1230 - RNA, 19 nt, artificial
  Chemically synthesized
uaguguucccucccucaaa

SEQ ID NO: 1231 - RNA, 19 nt, artificial
  Chemically synthesized
ggagacguggguccaaggu

SEQ ID NO: 1232 - RNA, 19 nt, artificial
  Chemically synthesized
ccuguucuauucagcggca

SEQ ID NO: 1233 - RNA, 19 nt, artificial
  Chemically synthesized
uccaguaugagaucaagca

SEQ ID NO: 1234 - RNA, 19 nt, artificial
  Chemically synthesized
caaaaugcuuccaaagcca

SEQ ID NO: 1235 - RNA, 19 nt, artificial
  Chemically synthesized
cacacgcaaugaaaccgaa

SEQ ID NO: 1236 - RNA, 19 nt, artificial
  Chemically synthesized
cuccauuuggcaucguuua

SEQ ID NO: 1237 - RNA, 19 nt, artificial
  Chemically synthesized
agcaggaguuucucgacau

SEQ ID NO: 1238 - RNA, 19 nt, artificial
  Chemically synthesized
guguggccuuuauauuuga

SEQ ID NO: 1239 - RNA, 19 nt, artificial
  Chemically synthesized
gggaccuggucagcacaga

SEQ ID NO: 1240 - RNA, 19 nt, artificial
  Chemically synthesized
ccucagugugguuuccuga

SEQ ID NO: 1241 - RNA, 19 nt, artificial
  Chemically synthesized
gacccagaguggaacgcgu

SEQ ID NO: 1242 - RNA, 19 nt, artificial
  Chemically synthesized
ccaccuguguuguaaagau

SEQ ID NO: 1243 - RNA, 19 nt, artificial
  Chemically synthesized
accuguguuguaaagauaa

SEQ ID NO: 1244 - RNA, 19 nt, artificial
  Chemically synthesized
guuuugcaaugcagaugua

SEQ ID NO: 1245 - RNA, 19 nt, artificial
  Chemically synthesized
aaaaaagccuccaaggguu

SEQ ID NO: 1246 - RNA, 19 nt, artificial
  Chemically synthesized
uaagaaacuuccuagggaa

SEQ ID NO: 1247 - RNA, 19 nt, artificial
  Chemically synthesized
gcauuugacccagagugga

SEQ ID NO: 1248 - RNA, 19 nt, artificial
  Chemically synthesized
cccucaaggucccuucccu

SEQ ID NO: 1249 - RNA, 19 nt, artificial
  Chemically synthesized
aggauccaguaugagauca

SEQ ID NO: 1250 - RNA, 19 nt, artificial
  Chemically synthesized
aagauuaccuagcuaagaa

SEQ ID NO: 1251 - RNA, 19 nt, artificial
  Chemically synthesized
cuauguguucccucagugu

SEQ ID NO: 1252 - RNA, 19 nt, artificial
  Chemically synthesized
gacagaggaagccgcucaa

SEQ ID NO: 1253 - RNA, 19 nt, artificial
  Chemically synthesized
uuaagaaggcucuccauuu

SEQ ID NO: 1254 - RNA, 19 nt, artificial
  Chemically synthesized
uaaggagaaucucuuguuu

SEQ ID NO: 1255 - RNA, 19 nt, artificial
  Chemically synthesized
guuuccugaagccagugau

SEQ ID NO: 1256 - RNA, 19 nt, artificial
  Chemically synthesized
ugagcaccacccagaagaa

SEQ ID NO: 1257 - RNA, 19 nt, artificial
  Chemically synthesized
cuauuaauccucagaauuc

SEQ ID NO: 1258 - RNA, 19 nt, artificial
  Chemically synthesized
cugggcguggucuugcaaa

SEQ ID NO: 1259 - RNA, 19 nt, artificial
  Chemically synthesized
ggaggaaagaaggaauauc

SEQ ID NO: 1260 - RNA, 19 nt, artificial
  Chemically synthesized
ccaaguucuucgccugcau

SEQ ID NO: 1261 - RNA, 19 nt, artificial
  Chemically synthesized
guuucugcugauuguuuuu

SEQ ID NO: 1262 - RNA, 19 nt, artificial
  Chemically synthesized
gguccaagguccucauccc

SEQ ID NO: 1263 - RNA, 19 nt, artificial
  Chemically synthesized
aguugguaagaugucauaa

SEQ ID NO: 1264 - RNA, 19 nt, artificial
  Chemically synthesized
ggaauaugaagucugagac

SEQ ID NO: 1265 - RNA, 19 nt, artificial
  Chemically synthesized
gaguggaacgcguggccua

SEQ ID NO: 1266 - RNA, 19 nt, artificial
  Chemically synthesized
gguugugggucuggaggga

SEQ ID NO: 1267 - RNA, 19 nt, artificial
  Chemically synthesized
guugauuuuguuuccguuu

SEQ ID NO: 1268 - RNA, 19 nt, artificial
  Chemically synthesized
cacuguguuuaugcuggaa

SEQ ID NO: 1269 - RNA, 19 nt, artificial
  Chemically synthesized
gagcugcguuccagccuca

SEQ ID NO: 1270 - RNA, 19 nt, artificial
  Chemically synthesized
ggacugggucacagagaag

SEQ ID NO: 1271 - RNA, 19 nt, artificial
  Chemically synthesized
agcuaagcauaguaagaag

SEQ ID NO: 1272 - RNA, 19 nt, artificial
  Chemically synthesized
cacaagaguuguugaaagu

SEQ ID NO: 1273 - RNA, 19 nt, artificial
  Chemically synthesized
ggucagcacagaucuugau

SEQ ID NO: 1274 - RNA, 19 nt, artificial
  Chemically synthesized
uucuaaaggugaauucuca

SEQ ID NO: 1275 - RNA, 19 nt, artificial
  Chemically synthesized
agggaacuagggaaccuau

SEQ ID NO: 1276 - RNA, 19 nt, artificial
  Chemically synthesized
ggaaguggacucuggaaac

SEQ ID NO: 1277 - RNA, 19 nt, artificial
  Chemically synthesized
ccucccaccuguguuguaa

SEQ ID NO: 1278 - RNA, 19 nt, artificial
  Chemically synthesized
cggacgagugccucuggau

SEQ ID NO: 1279 - RNA, 19 nt, artificial
  Chemically synthesized
cguggaagcauuugaccca

SEQ ID NO: 1280 - RNA, 19 nt, artificial
  Chemically synthesized
gcacuguguuuaugcugga

SEQ ID NO: 1281 - RNA, 19 nt, artificial
  Chemically synthesized
aguugcagauauaccaacu

SEQ ID NO: 1282 - RNA, 19 nt, artificial
  Chemically synthesized
aaugauaaggagaaucucu

SEQ ID NO: 1283 - RNA, 19 nt, artificial
  Chemically synthesized
cuugcugccguaauuuaaa

SEQ ID NO: 1284 - RNA, 19 nt, artificial
  Chemically synthesized
ggagaaucucuuguuuccu

SEQ ID NO: 1285 - RNA, 19 nt, artificial
  Chemically synthesized
ccuugguagguauuagacu

SEQ ID NO: 1286 - RNA, 19 nt, artificial
  Chemically synthesized
ggacguuggaggaaagaag

SEQ ID NO: 1287 - RNA, 19 nt, artificial
  Chemically synthesized
cguuggaggaaagaaggaa

SEQ ID NO: 1288 - RNA, 19 nt, artificial
  Chemically synthesized
cugacaucccuuccuggaa

SEQ ID NO: 1289 - RNA, 19 nt, artificial
  Chemically synthesized
ugacaucccuuccuggaaa

SEQ ID NO: 1290 - RNA, 19 nt, artificial
  Chemically synthesized
gauauaccaacuucugcuu

SEQ ID NO: 1291 - RNA, 19 nt, artificial
  Chemically synthesized
agaugggcugcgagugcaa

SEQ ID NO: 1292 - RNA, 19 nt, artificial
  Chemically synthesized
ggcuuaguguucccucccu

SEQ ID NO: 1293 - RNA, 19 nt, artificial
  Chemically synthesized
guauggugauaucauaugu

SEQ ID NO: 1294 - RNA, 19 nt, artificial
  Chemically synthesized
accaacuucugcuuguauu

SEQ ID NO: 1295 - RNA, 19 nt, artificial
  Chemically synthesized
cucacuucuuucucagccu

SEQ ID NO: 1296 - RNA, 19 nt, artificial
  Chemically synthesized
cucccaccuguguuguaaa

SEQ ID NO: 1297 - RNA, 19 nt, artificial
  Chemically synthesized
gggucucgcuggacguugg

SEQ ID NO: 1298 - RNA, 19 nt, artificial
  Chemically synthesized
gagccucccucugagccuu

SEQ ID NO: 1299 - RNA, 19 nt, artificial
  Chemically synthesized
gcaugucucugaugcuuug

SEQ ID NO: 1300 - RNA, 19 nt, artificial
  Chemically synthesized
ggcguuuucaugcuguaca

SEQ ID NO: 1301 - RNA, 19 nt, artificial
  Chemically synthesized
auaccaacuucugcuugua

SEQ ID NO: 1302 - RNA, 19 nt, artificial
  Chemically synthesized
gcaaugcagauguagugau

SEQ ID NO: 1303 - RNA, 19 nt, artificial
  Chemically synthesized
acuucugcuuguauuucuu

SEQ ID NO: 1304 - RNA, 19 nt, artificial
  Chemically synthesized
uccaguucaaauuauugca

SEQ ID NO: 1305 - RNA, 19 nt, artificial
  Chemically synthesized
ccuggucagcacagaucuu

SEQ ID NO: 1306 - RNA, 19 nt, artificial
  Chemically synthesized
uguugauuuuguuuccguu

SEQ ID NO: 1307 - RNA, 19 nt, artificial
  Chemically synthesized
ugcagauauaccaacuucu

SEQ ID NO: 1308 - RNA, 19 nt, artificial
  Chemically synthesized
gcggucagugagaaggaag

SEQ ID NO: 1309 - RNA, 19 nt, artificial
  Chemically synthesized
ggcguggucuugcaaaaug

SEQ ID NO: 1310 - RNA, 19 nt, artificial
  Chemically synthesized
guccagccuaggaagggaa

SEQ ID NO: 1311 - RNA, 19 nt, artificial
  Chemically synthesized
acuuucucgguaaugauaa

SEQ ID NO: 1312 - RNA, 19 nt, artificial
  Chemically synthesized
cuucugcuuguauuucuua

SEQ ID NO: 1313 - RNA, 19 nt, artificial
  Chemically synthesized
cagaggaagccgcucaaau

SEQ ID NO: 1314 - RNA, 19 nt, artificial
  Chemically synthesized
gaaggaaguggacucugga

SEQ ID NO: 1315 - RNA, 19 nt, artificial
  Chemically synthesized
cagugagaaggaaguggac

SEQ ID NO: 1316 - RNA, 19 nt, artificial
  Chemically synthesized
gacuucccuuucuagggca

SEQ ID NO: 1317 - RNA, 19 nt, artificial
  Chemically synthesized
ccucccucugagccuugua

SEQ ID NO: 1318 - RNA, 19 nt, artificial
  Chemically synthesized
caugcuguacagugaccua

SEQ ID NO: 1319 - RNA, 19 nt, artificial
  Chemically synthesized
gagugccucuggauggacu

SEQ ID NO: 1320 - RNA, 19 nt, artificial
  Chemically synthesized
cugggaggguauccaggaa

SEQ ID NO: 1321 - RNA, 19 nt, artificial
  Chemically synthesized
aaccgugcugagcagaaaa

SEQ ID NO: 1322 - RNA, 19 nt, artificial
  Chemically synthesized
caguccaugugauuucagu

SEQ ID NO: 1323 - RNA, 19 nt, artificial
  Chemically synthesized
uagacaugguugugggucu

SEQ ID NO: 1324 - RNA, 19 nt, artificial
  Chemically synthesized
gcgcaugucucugaugcuu

SEQ ID NO: 1325 - RNA, 19 nt, artificial
  Chemically synthesized
aaggugaauucucagauga

SEQ ID NO: 1326 - RNA, 19 nt, artificial
  Chemically synthesized
agaagaacaucaacgggca

SEQ ID NO: 1327 - RNA, 19 nt, artificial
  Chemically synthesized
acauacacacgcaaugaaa

SEQ ID NO: 1328 - RNA, 19 nt, artificial
  Chemically synthesized
cacagaucuugaugacuuc

SEQ ID NO: 1329 - RNA, 19 nt, artificial
  Chemically synthesized
agccgcucaaauaccuuca

SEQ ID NO: 1330 - RNA, 19 nt, artificial
  Chemically synthesized
ccaguaugagaucaagcag

SEQ ID NO: 1331 - RNA, 19 nt, artificial
  Chemically synthesized
gugagaaggaaguggacuc

SEQ ID NO: 1332 - RNA, 19 nt, artificial
  Chemically synthesized
accuuagccuguucuauuc

SEQ ID NO: 1333 - RNA, 19 nt, artificial
  Chemically synthesized
ccuguuucugcugauuguu

SEQ ID NO: 1334 - RNA, 19 nt, artificial
  Chemically synthesized
gccauugcuucuugccugu

SEQ ID NO: 1335 - RNA, 19 nt, artificial
  Chemically synthesized
gccuggaaaugugcauuuu

SEQ ID NO: 1336 - RNA, 19 nt, artificial
  Chemically synthesized
gcacagcucucuucuccua

SEQ ID NO: 1337 - RNA, 19 nt, artificial
  Chemically synthesized
cgacauuuauggcaacccu

SEQ ID NO: 1338 - RNA, 19 nt, artificial
  Chemically synthesized
ccugugcuguguuuuuuau

SEQ ID NO: 1339 - RNA, 19 nt, artificial
  Chemically synthesized
aggaaguggacucuggaaa

SEQ ID NO: 1340 - RNA, 19 nt, artificial
  Chemically synthesized
gcuaagcauaguaagaagu

SEQ ID NO: 1341 - RNA, 19 nt, artificial
  Chemically synthesized
ccgucuuugguucuccagu

SEQ ID NO: 1342 - RNA, 19 nt, artificial
  Chemically synthesized
uuuccugaagccagugaua

SEQ ID NO: 1343 - RNA, 19 nt, artificial
  Chemically synthesized
agacguggguccaaggucc

SEQ ID NO: 1344 - RNA, 19 nt, artificial
  Chemically synthesized
acauuuauggcaacccuau

SEQ ID NO: 1345 - RNA, 19 nt, artificial
  Chemically synthesized
guggacaauaaacaguauu

SEQ ID NO: 1346 - RNA, 19 nt, artificial
  Chemically synthesized
gggaacacacaagaguugu

SEQ ID NO: 1347 - RNA, 19 nt, artificial
  Chemically synthesized
gcucgguccguggacaaua

SEQ ID NO: 1348 - RNA, 19 nt, artificial
  Chemically synthesized
ccgugcugagcagaaaaca

SEQ ID NO: 1349 - RNA, 19 nt, artificial
  Chemically synthesized
ccgcucaaauaccuucaca

SEQ ID NO: 1350 - RNA, 19 nt, artificial
  Chemically synthesized
guucccucccucaaagacu

SEQ ID NO: 1351 - RNA, 19 nt, artificial
  Chemically synthesized
ggucguugcaagacugugu

SEQ ID NO: 1352 - RNA, 19 nt, artificial
  Chemically synthesized
ggugcugggaacacacaag

SEQ ID NO: 1353 - RNA, 19 nt, artificial
  Chemically synthesized
aguauauacaacuccacca

SEQ ID NO: 1354 - RNA, 19 nt, artificial
  Chemically synthesized
ggcaucaggcaccuggauu

SEQ ID NO: 1355 - RNA, 19 nt, artificial
  Chemically synthesized
agcagauaaagauguucaa

SEQ ID NO: 1356 - RNA, 19 nt, artificial
  Chemically synthesized
uggaauaugaagucugaga

SEQ ID NO: 1357 - RNA, 19 nt, artificial
  Chemically synthesized
caggcaccuggauugaguu

SEQ ID NO: 1358 - RNA, 19 nt, artificial
  Chemically synthesized
auaaggagaaucucuuguu

SEQ ID NO: 1359 - RNA, 19 nt, artificial
  Chemically synthesized
gccuguuuuaagagacauc

SEQ ID NO: 1360 - RNA, 19 nt, artificial
  Chemically synthesized
cgcuuccuguauggugaua

SEQ ID NO: 1361 - RNA, 19 nt, artificial
  Chemically synthesized
gcaccgucacagaugccaa

SEQ ID NO: 1362 - RNA, 19 nt, artificial
  Chemically synthesized
guuccagccucagcugagu

SEQ ID NO: 1363 - RNA, 19 nt, artificial
  Chemically synthesized
ggagguagguggcuuuggu

SEQ ID NO: 1364 - RNA, 19 nt, artificial
  Chemically synthesized
ggaaacgacauuuauggca

SEQ ID NO: 1365 - RNA, 19 nt, artificial
  Chemically synthesized
gcaagaugcacaucacccu

SEQ ID NO: 1366 - RNA, 19 nt, artificial
  Chemically synthesized
uguagaaaugggagcgaga

SEQ ID NO: 1367 - RNA, 19 nt, artificial
  Chemically synthesized
ggccuaugcagguggauuc

SEQ ID NO: 1368 - RNA, 19 nt, artificial
  Chemically synthesized
aagaagagccugaaccaca

SEQ ID NO: 1369 - RNA, 19 nt, artificial
  Chemically synthesized
gggaggguauccaggaauc

SEQ ID NO: 1370 - RNA, 19 nt, artificial
  Chemically synthesized
gucauaauggaccagucca

SEQ ID NO: 1371 - RNA, 19 nt, artificial
  Chemically synthesized
ccaagguccucaucccauc

SEQ ID NO: 1372 - RNA, 19 nt, artificial
  Chemically synthesized
agguggcuuuggugacaca

SEQ ID NO: 1373 - RNA, 19 nt, artificial
  Chemically synthesized
agacuguguagcaggccua

SEQ ID NO: 1374 - RNA, 19 nt, artificial
  Chemically synthesized
ggccuggaaaugugcauuu

SEQ ID NO: 1375 - RNA, 19 nt, artificial
  Chemically synthesized
gguuaggauaggaagaacu

SEQ ID NO: 1376 - RNA, 19 nt, artificial
  Chemically synthesized
ggcuaguucuugaaggagc

SEQ ID NO: 1377 - RNA, 19 nt, artificial
  Chemically synthesized
agcucuguugauuuuguuu

SEQ ID NO: 1378 - RNA, 19 nt, artificial
  Chemically synthesized
ugcauuuugcagaaacuuu

SEQ ID NO: 1379 - RNA, 19 nt, artificial
  Chemically synthesized
gucugaaagguguggccuu

SEQ ID NO: 1380 - RNA, 19 nt, artificial
  Chemically synthesized
cauccaagggcagccugga

SEQ ID NO: 1381 - RNA, 19 nt, artificial
  Chemically synthesized
uguuucugcugauuguuuu

SEQ ID NO: 1382 - RNA, 19 nt, artificial
  Chemically synthesized
ugcaagcaacucaaaauau

SEQ ID NO: 1383 - RNA, 19 nt, artificial
  Chemically synthesized
aacauuuacuccuguuucu

SEQ ID NO: 1384 - RNA, 19 nt, artificial
  Chemically synthesized
gaaagguguggccuuuaua

SEQ ID NO: 1385 - RNA, 19 nt, artificial
  Chemically synthesized
uccuguuucugcugauugu

SEQ ID NO: 1386 - RNA, 19 nt, artificial
  Chemically synthesized
auccuauuaauccucagaa

SEQ ID NO: 1387 - RNA, 19 nt, artificial
  Chemically synthesized
uccugaagccagugauaug

SEQ ID NO: 1388 - RNA, 19 nt, artificial
  Chemically synthesized
agggccugagaaggauaua

SEQ ID NO: 1389 - RNA, 19 nt, artificial
  Chemically synthesized
guugcagauauaccaacuu

SEQ ID NO: 1390 - RNA, 19 nt, artificial
  Chemically synthesized
gggccugagaaggauauag

SEQ ID NO: 1391 - RNA, 19 nt, artificial
  Chemically synthesized
cgggcguuuucaugcugua

SEQ ID NO: 1392 - RNA, 19 nt, artificial
  Chemically synthesized
accaguccaugugauuuca

SEQ ID NO: 1393 - RNA, 19 nt, artificial
  Chemically synthesized
cguggguccaagguccuca

SEQ ID NO: 1394 - RNA, 19 nt, artificial
  Chemically synthesized
gccuggaaccaguggcuag

SEQ ID NO: 1395 - RNA, 19 nt, artificial
  Chemically synthesized
ccuuucaucuugagaggga

SEQ ID NO: 1396 - RNA, 19 nt, artificial
  Chemically synthesized
ccagugggagccucccucu

SEQ ID NO: 1397 - RNA, 19 nt, artificial
  Chemically synthesized
aaaugugcauuuugcagaa

SEQ ID NO: 1398 - RNA, 19 nt, artificial
  Chemically synthesized
uggucagcacagaucuuga

SEQ ID NO: 1399 - RNA, 19 nt, artificial
  Chemically synthesized
cuaugcagguggauuccuu

SEQ ID NO: 1400 - RNA, 19 nt, artificial
  Chemically synthesized
aguaagaaguccagccuag

SEQ ID NO: 1401 - RNA, 19 nt, artificial
  Chemically synthesized
cucaucccauggguccaaa

SEQ ID NO: 1402 - RNA, 19 nt, artificial
  Chemically synthesized
agagccggguggcagcuga

SEQ ID NO: 1403 - RNA, 19 nt, artificial
  Chemically synthesized
gcugggaacacacaagagu

SEQ ID NO: 1404 - RNA, 19 nt, artificial
  Chemically synthesized
ccggacgagugccucugga

SEQ ID NO: 1405 - RNA, 19 nt, artificial
  Chemically synthesized
cccucagugugguuuccug

SEQ ID NO: 1406 - RNA, 19 nt, artificial
  Chemically synthesized
aguugcacagcuuugcuuu

SEQ ID NO: 1407 - RNA, 19 nt, artificial
  Chemically synthesized
cccauaagcaggccuccaa

SEQ ID NO: 1408 - RNA, 19 nt, artificial
  Chemically synthesized
cggugcugggaacacacaa

SEQ ID NO: 1409 - RNA, 19 nt, artificial
  Chemically synthesized
gguuuguuuuugacaucag

SEQ ID NO: 1410 - RNA, 19 nt, artificial
  Chemically synthesized
gacgauauacaggcacauu

SEQ ID NO: 1411 - RNA, 19 nt, artificial
  Chemically synthesized
cuuaguguucccucccuca

SEQ ID NO: 1412 - RNA, 19 nt, artificial
  Chemically synthesized
gacacacucacuucuuucu

SEQ ID NO: 1413 - RNA, 19 nt, artificial
  Chemically synthesized
gaagccgcucaaauaccuu

SEQ ID NO: 1414 - RNA, 19 nt, artificial
  Chemically synthesized
ggucccuuucaucuugaga

SEQ ID NO: 1415 - RNA, 19 nt, artificial
  Chemically synthesized
ccuggaaccaguggcuagu

SEQ ID NO: 1416 - RNA, 19 nt, artificial
  Chemically synthesized
uucaguauauacaacucca

SEQ ID NO: 1417 - RNA, 19 nt, artificial
  Chemically synthesized
accuauguguucccucagu

SEQ ID NO: 1418 - RNA, 19 nt, artificial
  Chemically synthesized
cuccuauuuucauccugca

SEQ ID NO: 1419 - RNA, 19 nt, artificial
  Chemically synthesized
acacacaagaguuguugaa

SEQ ID NO: 1420 - RNA, 19 nt, artificial
  Chemically synthesized
ugucucugaugcuuuguau

SEQ ID NO: 1421 - RNA, 19 nt, artificial
  Chemically synthesized
uagaaaugggagcgagaaa

SEQ ID NO: 1422 - RNA, 19 nt, artificial
  Chemically synthesized
gaagcauuugacccagagu

SEQ ID NO: 1423 - RNA, 19 nt, artificial
  Chemically synthesized
guuuuugacaucagcugua

SEQ ID NO: 1424 - RNA, 19 nt, artificial
  Chemically synthesized
ggaguuucucgacaucgag

SEQ ID NO: 1425 - RNA, 19 nt, artificial
  Chemically synthesized
gauaaacugacgauauaca

SEQ ID NO: 1426 - RNA, 19 nt, artificial
  Chemically synthesized
guguucccucccucaaaga

SEQ ID NO: 1427 - RNA, 19 nt, artificial
  Chemically synthesized
uuuguuuccguuuggauuu

SEQ ID NO: 1428 - RNA, 19 nt, artificial
  Chemically synthesized
agcugagucuuuuuggucu

SEQ ID NO: 1429 - RNA, 19 nt, artificial
  Chemically synthesized
aacuuucucgguaaugaua

SEQ ID NO: 1430 - RNA, 19 nt, artificial
  Chemically synthesized
ccggguggcagcugacaga

SEQ ID NO: 1431 - RNA, 19 nt, artificial
  Chemically synthesized
gaguugcacagcuuugcuu

SEQ ID NO: 1432 - RNA, 19 nt, artificial
  Chemically synthesized
ccgggaccuggucagcaca

SEQ ID NO: 1433 - RNA, 19 nt, artificial
  Chemically synthesized
caaaguaaaggaucuuuga

SEQ ID NO: 1434 - RNA, 19 nt, artificial
  Chemically synthesized
cagcucucuucuccuauuu

SEQ ID NO: 1435 - RNA, 19 nt, artificial
  Chemically synthesized
gacagaaaaagcugggucu

SEQ ID NO: 1436 - RNA, 19 nt, artificial
  Chemically synthesized
ugcaugugacgccagcuaa

SEQ ID NO: 1437 - RNA, 19 nt, artificial
  Chemically synthesized
ccagccucagcugagucuu

SEQ ID NO: 1438 - RNA, 19 nt, artificial
  Chemically synthesized
gaccuaaaguugguaagau

SEQ ID NO: 1439 - RNA, 19 nt, artificial
  Chemically synthesized
gguguggccuuuauauuug

SEQ ID NO: 1440 - RNA, 19 nt, artificial
  Chemically synthesized
guccaagguccucauccca

SEQ ID NO: 1441 - RNA, 19 nt, artificial
  Chemically synthesized
uaguaagaaguccagccua

SEQ ID NO: 1442 - RNA, 19 nt, artificial
  Chemically synthesized
aagcauaguaagaagucca

SEQ ID NO: 1443 - RNA, 19 nt, artificial
  Chemically synthesized
aggauaggaagaacuuucu

SEQ ID NO: 1444 - RNA, 19 nt, artificial
  Chemically synthesized
aggagaaucucuuguuucc

SEQ ID NO: 1445 - RNA, 19 nt, artificial
  Chemically synthesized
caagaguuguugaaaguug

SEQ ID NO: 1446 - RNA, 19 nt, artificial
  Chemically synthesized
cccaugaucccgugcuaca

SEQ ID NO: 1447 - RNA, 19 nt, artificial
  Chemically synthesized
caucccauggguccaaauu

SEQ ID NO: 1448 - RNA, 19 nt, artificial
  Chemically synthesized
cugagcagaaaacaaaaca

SEQ ID NO: 1449 - RNA, 19 nt, artificial
  Chemically synthesized
agcagaaaacaaaacaggu

SEQ ID NO: 1450 - RNA, 19 nt, artificial
  Chemically synthesized
cuuguuuccucccaccugu

SEQ ID NO: 1451 - RNA, 19 nt, artificial
  Chemically synthesized
guggacucuggaaacgaca

SEQ ID NO: 1452 - RNA, 19 nt, artificial
  Chemically synthesized
ugauaaggagaaucucuug

SEQ ID NO: 1453 - RNA, 19 nt, artificial
  Chemically synthesized
ugaguagguucggucugaa

SEQ ID NO: 1454 - RNA, 19 nt, artificial
  Chemically synthesized
cauuuggcaucguuuaauu

SEQ ID NO: 1455 - RNA, 19 nt, artificial
  Chemically synthesized
gcuuccuguauggugauau

SEQ ID NO: 1456 - RNA, 19 nt, artificial
  Chemically synthesized
gaggauccaguaugagauc

SEQ ID NO: 1457 - RNA, 19 nt, artificial
  Chemically synthesized
gcacauccugaggacagaa

SEQ ID NO: 1458 - RNA, 19 nt, artificial
  Chemically synthesized
gcaugaauaaaacacucau

SEQ ID NO: 1459 - RNA, 19 nt, artificial
  Chemically synthesized
gcaacaggcguuuugcaau

SEQ ID NO: 1460 - RNA, 19 nt, artificial
  Chemically synthesized
gggacggcaagaugcacau

SEQ ID NO: 1461 - RNA, 19 nt, artificial
  Chemically synthesized
cuguaaucauuccugugcu

SEQ ID NO: 1462 - RNA, 19 nt, artificial
  Chemically synthesized
ggucuuuuaaccgugcuga

SEQ ID NO: 1463 - RNA, 19 nt, artificial
  Chemically synthesized
acagcucucuucuccuauu

SEQ ID NO: 1464 - RNA, 19 nt, artificial
  Chemically synthesized
acccuugguagguauuaga

SEQ ID NO: 1465 - RNA, 19 nt, artificial
  Chemically synthesized
gacugguccagcucugaca

SEQ ID NO: 1466 - RNA, 19 nt, artificial
  Chemically synthesized
auccugcaagcaacucaaa

SEQ ID NO: 1467 - RNA, 19 nt, artificial
  Chemically synthesized
ccaugaucccgugcuacau

SEQ ID NO: 1468 - RNA, 19 nt, artificial
  Chemically synthesized
uuguaucauucuugagcaa

SEQ ID NO: 1469 - RNA, 19 nt, artificial
  Chemically synthesized
gagucuuuuuggucugcac

SEQ ID NO: 1470 - RNA, 19 nt, artificial
  Chemically synthesized
guucaaagggccugagaag

SEQ ID NO: 1471 - RNA, 19 nt, artificial
  Chemically synthesized
agccucagcugagucuuuu

SEQ ID NO: 1472 - RNA, 19 nt, artificial
  Chemically synthesized
gauaaggagaaucucuugu

SEQ ID NO: 1473 - RNA, 19 nt, artificial
  Chemically synthesized
acaucacccucugugacuu

SEQ ID NO: 1474 - RNA, 19 nt, artificial
  Chemically synthesized
gcguggucuugcaaaaugc

SEQ ID NO: 1475 - RNA, 19 nt, artificial
  Chemically synthesized
gccuuggcaccgucacaga

SEQ ID NO: 1476 - RNA, 19 nt, artificial
  Chemically synthesized
agaagagccugaaccacag

SEQ ID NO: 1477 - RNA, 19 nt, artificial
  Chemically synthesized
uggccuguuuuaagagaca

SEQ ID NO: 1478 - RNA, 19 nt, artificial
  Chemically synthesized
gggaaggauuuuggaggua

SEQ ID NO: 1479 - RNA, 19 nt, artificial
  Chemically synthesized
cccuguggccaacugcaaa

SEQ ID NO: 1480 - RNA, 19 nt, artificial
  Chemically synthesized
cuuucucgguaaugauaag

SEQ ID NO: 1481 - RNA, 19 nt, artificial
  Chemically synthesized
cacucaucccaugggucca

SEQ ID NO: 1482 - RNA, 19 nt, artificial
  Chemically synthesized
gguggcagcugacagagga

SEQ ID NO: 1483 - RNA, 19 nt, artificial
  Chemically synthesized
gugaauucucagaugauag

SEQ ID NO: 1484 - RNA, 19 nt, artificial
  Chemically synthesized
uccugcaagcaacucaaaa

SEQ ID NO: 1485 - RNA, 19 nt, artificial
  Chemically synthesized
ccuguuuuaagagacaucu

SEQ ID NO: 1486 - RNA, 19 nt, artificial
  Chemically synthesized
gggcagccuggaaccagug

SEQ ID NO: 1487 - RNA, 19 nt, artificial
  Chemically synthesized
gcaucaggcaccuggauug

SEQ ID NO: 1488 - RNA, 19 nt, artificial
  Chemically synthesized
agccuggaaccaguggcua

SEQ ID NO: 1489 - RNA, 19 nt, artificial
  Chemically synthesized
ugcacaucacccucuguga

SEQ ID NO: 1490 - RNA, 19 nt, artificial
  Chemically synthesized
agauauaccaacuucugcu

SEQ ID NO: 1491 - RNA, 19 nt, artificial
  Chemically synthesized
cuagcuaagaaacuuccua

SEQ ID NO: 1492 - RNA, 19 nt, artificial
  Chemically synthesized
cucucuucuccuauuuuca

SEQ ID NO: 1493 - RNA, 19 nt, artificial
  Chemically synthesized
auccaagggcagccuggaa

SEQ ID NO: 1494 - RNA, 19 nt, artificial
  Chemically synthesized
aaaggaucuuugaguaggu

SEQ ID NO: 1495 - RNA, 19 nt, artificial
  Chemically synthesized
cugagcaccacccagaaga

SEQ ID NO: 1496 - RNA, 19 nt, artificial
  Chemically synthesized
ccuguucuggcaucaggca

SEQ ID NO: 1497 - RNA, 19 nt, artificial
  Chemically synthesized
uguguuuaugcuggaauau

SEQ ID NO: 1498 - RNA, 19 nt, artificial
  Chemically synthesized
aggaagaacuuucucggua

SEQ ID NO: 1499 - RNA, 19 nt, artificial
  Chemically synthesized
agagccugaaccacaggua

SEQ ID NO: 1500 - RNA, 19 nt, artificial
  Chemically synthesized
gccaagcaggcagcacuua

SEQ ID NO: 1501 - RNA, 19 nt, artificial
  Chemically synthesized
gggcuuucugcaugugacg

SEQ ID NO: 1502 - RNA, 19 nt, artificial
  Chemically synthesized
acccagaagaagagccuga

SEQ ID NO: 1503 - RNA, 19 nt, artificial
  Chemically synthesized
cgccugcaucaagagaagu

SEQ ID NO: 1504 - RNA, 19 nt, artificial
  Chemically synthesized
gcagauauaccaacuucug

SEQ ID NO: 1505 - RNA, 19 nt, artificial
  Chemically synthesized
uggaccaguccaugugauu

SEQ ID NO: 1506 - RNA, 19 nt, artificial
  Chemically synthesized
uguaacauuuacuccuguu

SEQ ID NO: 1507 - RNA, 19 nt, artificial
  Chemically synthesized
cagcuguaaucauuccugu

SEQ ID NO: 1508 - RNA, 19 nt, artificial
  Chemically synthesized
gaguuguugaaaguugaca

SEQ ID NO: 1509 - RNA, 19 nt, artificial
  Chemically synthesized
agacugcgcaugucucuga

SEQ ID NO: 1510 - RNA, 19 nt, artificial
  Chemically synthesized
uccugugcuguguuuuuua

SEQ ID NO: 1511 - RNA, 19 nt, artificial
  Chemically synthesized
ccuucuccuuuuagacaug

SEQ ID NO: 1512 - RNA, 19 nt, artificial
  Chemically synthesized
cuaagaaacuuccuaggga

SEQ ID NO: 1513 - RNA, 19 nt, artificial
  Chemically synthesized
gccaaguucuucgccugca

SEQ ID NO: 1514 - RNA, 19 nt, artificial
  Chemically synthesized
gcuggacguuggaggaaag

SEQ ID NO: 1515 - RNA, 19 nt, artificial
  Chemically synthesized
aggcguuuugcaaugcaga

SEQ ID NO: 1516 - RNA, 19 nt, artificial
  Chemically synthesized
ugugcauuuugcagaaacu

SEQ ID NO: 1517 - RNA, 19 nt, artificial
  Chemically synthesized
cagccuggaaccaguggcu

SEQ ID NO: 1518 - RNA, 19 nt, artificial
  Chemically synthesized
gcaaaaaaagccuccaagg

SEQ ID NO: 1519 - RNA, 19 nt, artificial
  Chemically synthesized
accuggauugaguugcaca

SEQ ID NO: 1520 - RNA, 19 nt, artificial
  Chemically synthesized
cguaauuuaaagcucuguu

SEQ ID NO: 1521 - RNA, 19 nt, artificial
  Chemically synthesized
cugugcuguguuuuuuauu

SEQ ID NO: 1522 - RNA, 19 nt, artificial
  Chemically synthesized
ggcaccaggccaaguucuu

SEQ ID NO: 1523 - RNA, 19 nt, artificial
  Chemically synthesized
ccuguggccaacugcaaaa

SEQ ID NO: 1524 - RNA, 19 nt, artificial
  Chemically synthesized
gguuucgacugguccagcu

SEQ ID NO: 1525 - RNA, 19 nt, artificial
  Chemically synthesized
gaauaaaacacucauccca

SEQ ID NO: 1526 - RNA, 19 nt, artificial
  Chemically synthesized
gaguugcagauauaccaac

SEQ ID NO: 1527 - RNA, 19 nt, artificial
  Chemically synthesized
cuuccuguauggugauauc

SEQ ID NO: 1528 - RNA, 19 nt, artificial
  Chemically synthesized
uuugguucuccaguucaaa

SEQ ID NO: 1529 - RNA, 19 nt, artificial
  Chemically synthesized
gccugcaucaagagaagug

SEQ ID NO: 1530 - RNA, 19 nt, artificial
  Chemically synthesized
ggcaacccuaucaagagga

SEQ ID NO: 1531 - RNA, 19 nt, artificial
  Chemically synthesized
aagcggucagugagaagga

SEQ ID NO: 1532 - RNA, 19 nt, artificial
  Chemically synthesized
guggcuuuggugacacacu

SEQ ID NO: 1533 - RNA, 19 nt, artificial
  Chemically synthesized
agaucuugaugacuucccu

SEQ ID NO: 1534 - RNA, 19 nt, artificial
  Chemically synthesized
gagacguggguccaagguc

SEQ ID NO: 1535 - RNA, 19 nt, artificial
  Chemically synthesized
ugacaucagcuguaaucau

SEQ ID NO: 1536 - RNA, 19 nt, artificial
  Chemically synthesized
gggaucucccagcuggguu

SEQ ID NO: 1537 - RNA, 19 nt, artificial
  Chemically synthesized
agcacuuagggaucuccca

SEQ ID NO: 1538 - RNA, 19 nt, artificial
  Chemically synthesized
gucuuugguucuccaguuc

SEQ ID NO: 1539 - RNA, 19 nt, artificial
  Chemically synthesized
uaaccgugcugagcagaaa

SEQ ID NO: 1540 - RNA, 19 nt, artificial
  Chemically synthesized
cuggauggacugggucaca

SEQ ID NO: 1541 - RNA, 19 nt, artificial
  Chemically synthesized
gugcugggaacacacaaga

SEQ ID NO: 1542 - RNA, 19 nt, artificial
  Chemically synthesized
agugggagccucccucuga

SEQ ID NO: 1543 - RNA, 19 nt, artificial
  Chemically synthesized
gcaggcagcacuuagggau

SEQ ID NO: 1544 - RNA, 19 nt, artificial
  Chemically synthesized
uauuggacuugcugccgua

SEQ ID NO: 1545 - RNA, 19 nt, artificial
  Chemically synthesized
gaucuugaugacuucccuu

SEQ ID NO: 1546 - RNA, 19 nt, artificial
  Chemically synthesized
acgccagcuaagcauagua

SEQ ID NO: 1547 - RNA, 19 nt, artificial
  Chemically synthesized
aggacacuauggccuguuu

SEQ ID NO: 1548 - RNA, 19 nt, artificial
  Chemically synthesized
gccugaaccacagguacca

SEQ ID NO: 1549 - RNA, 19 nt, artificial
  Chemically synthesized
ugguuuguuuuugacauca

SEQ ID NO: 1550 - RNA, 19 nt, artificial
  Chemically synthesized
guggcagcugacagaggaa

SEQ ID NO: 1551 - RNA, 19 nt, artificial
  Chemically synthesized
ccaucaauccuauuaaucc

SEQ ID NO: 1552 - RNA, 19 nt, artificial
  Chemically synthesized
ggacacuauggccuguuuu

SEQ ID NO: 1553 - RNA, 19 nt, artificial
  Chemically synthesized
gaccuuccggugcugggaa

SEQ ID NO: 1554 - RNA, 19 nt, artificial
  Chemically synthesized
acauccugaggacagaaaa

SEQ ID NO: 1555 - RNA, 19 nt, artificial
  Chemically synthesized
auguaaacauacacacgca

SEQ ID NO: 1556 - RNA, 19 nt, artificial
  Chemically synthesized
gccuccaaggguuucgacu

SEQ ID NO: 1557 - RNA, 19 nt, artificial
  Chemically synthesized
cugcaucaagagaagugac

SEQ ID NO: 1558 - RNA, 19 nt, artificial
  Chemically synthesized
uggaagcauuugacccaga

SEQ ID NO: 1559 - RNA, 19 nt, artificial
  Chemically synthesized
aacacacaagaguuguuga

SEQ ID NO: 1560 - RNA, 19 nt, artificial
  Chemically synthesized
gggaacuagggaaccuaug

SEQ ID NO: 1561 - RNA, 19 nt, artificial
  Chemically synthesized
auacaggcacauuauguaa

SEQ ID NO: 1562 - RNA, 19 nt, artificial
  Chemically synthesized
gacguggguccaagguccu

SEQ ID NO: 1563 - RNA, 19 nt, artificial
  Chemically synthesized
ggguuaggauaggaagaac

SEQ ID NO: 1564 - RNA, 19 nt, artificial
  Chemically synthesized
ggacgagugccucuggaug

SEQ ID NO: 1565 - RNA, 19 nt, artificial
  Chemically synthesized
aaaaagccuccaaggguuu

SEQ ID NO: 1566 - RNA, 19 nt, artificial
  Chemically synthesized
cuuugaguagguucggucu

SEQ ID NO: 1567 - RNA, 19 nt, artificial
  Chemically synthesized
ggcagacugggaggguauc

SEQ ID NO: 1568 - RNA, 19 nt, artificial
  Chemically synthesized
gaaggcucuccauuuggca

SEQ ID NO: 1569 - RNA, 19 nt, artificial
  Chemically synthesized
gccucccucugagccuugu

SEQ ID NO: 1570 - RNA, 19 nt, artificial
  Chemically synthesized
acaaaacagguuaagaaga

SEQ ID NO: 1571 - RNA, 19 nt, artificial
  Chemically synthesized
ccuauguguucccucagug

SEQ ID NO: 1572 - RNA, 19 nt, artificial
  Chemically synthesized
aaagggccugagaaggaua

SEQ ID NO: 1573 - RNA, 19 nt, artificial
  Chemically synthesized
gcagacugcgcaugucucu

SEQ ID NO: 1574 - RNA, 19 nt, artificial
  Chemically synthesized
cccucccaggcuuaguguu

SEQ ID NO: 1575 - RNA, 19 nt, artificial
  Chemically synthesized
ccuccaaggguuucgacug

SEQ ID NO: 1576 - RNA, 19 nt, artificial
  Chemically synthesized
gcuaguucuugaaggagcc

SEQ ID NO: 1577 - RNA, 19 nt, artificial
  Chemically synthesized
cuugaugacuucccuuucu

SEQ ID NO: 1578 - RNA, 19 nt, artificial
  Chemically synthesized
auuaauccucagaauucca

SEQ ID NO: 1579 - RNA, 19 nt, artificial
  Chemically synthesized
gaccaguccaugugauuuc

SEQ ID NO: 1580 - RNA, 19 nt, artificial
  Chemically synthesized
agugagaaggaaguggacu

SEQ ID NO: 1581 - RNA, 19 nt, artificial
  Chemically synthesized
gagaaucucuuguuuccuc

SEQ ID NO: 1582 - RNA, 19 nt, artificial
  Chemically synthesized
ggcucuccauuuggcaucg

SEQ ID NO: 1583 - RNA, 19 nt, artificial
  Chemically synthesized
cuucuugccuguucuggca

SEQ ID NO: 1584 - RNA, 19 nt, artificial
  Chemically synthesized
cuuuauauuugauccacac

SEQ ID NO: 1585 - RNA, 19 nt, artificial
  Chemically synthesized
gggccuggaaaugugcauu

SEQ ID NO: 1586 - RNA, 19 nt, artificial
  Chemically synthesized
cuuuggugacacacucacu

SEQ ID NO: 1587 - RNA, 19 nt, artificial
  Chemically synthesized
cagccuaggaagggaagga

SEQ ID NO: 1588 - RNA, 19 nt, artificial
  Chemically synthesized
cucgcuggacguuggagga

SEQ ID NO: 1589 - RNA, 19 nt, artificial
  Chemically synthesized
gcuuuauccgggcuugugu

SEQ ID NO: 1590 - RNA, 19 nt, artificial
  Chemically synthesized
uggacucuggaaacgacau

SEQ ID NO: 1591 - RNA, 19 nt, artificial
  Chemically synthesized
gcaucguggaagcauuuga

SEQ ID NO: 1592 - RNA, 19 nt, artificial
  Chemically synthesized
ccuaaaguugguaagaugu

SEQ ID NO: 1593 - RNA, 19 nt, artificial
  Chemically synthesized
guggucuugcaaaaugcuu

SEQ ID NO: 1594 - RNA, 19 nt, artificial
  Chemically synthesized
caaggucccuucccuagcu

SEQ ID NO: 1595 - RNA, 19 nt, artificial
  Chemically synthesized
gcuuuguaucauucuugag

SEQ ID NO: 1596 - RNA, 19 nt, artificial
  Chemically synthesized
gggcuucgauccuugggug

SEQ ID NO: 1597 - RNA, 19 nt, artificial
  Chemically synthesized
ucauaauggaccaguccau

SEQ ID NO: 1598 - RNA, 19 nt, artificial
  Chemically synthesized
uauaguuuaagaaggcucu

SEQ ID NO: 1599 - RNA, 19 nt, artificial
  Chemically synthesized
ucgacaucgaggacccaua

SEQ ID NO: 1600 - RNA, 19 nt, artificial
  Chemically synthesized
acuucuuucucagccucca

SEQ ID NO: 1601 - RNA, 19 nt, artificial
  Chemically synthesized
auucucagaugauagguga

SEQ ID NO: 1602 - RNA, 19 nt, artificial
  Chemically synthesized
ugagaaggaaguggacucu

SEQ ID NO: 1603 - RNA, 19 nt, artificial
  Chemically synthesized
caaagcaccuguuaagacu

SEQ ID NO: 1604 - RNA, 19 nt, artificial
  Chemically synthesized
gcguuccagccucagcuga

SEQ ID NO: 1605 - RNA, 19 nt, artificial
  Chemically synthesized
ccugggcguggucuugcaa

SEQ ID NO: 1606 - RNA, 19 nt, artificial
  Chemically synthesized
gucucugaugcuuuguauc

SEQ ID NO: 1607 - RNA, 19 nt, artificial
  Chemically synthesized
cugugcccucccaggcuua

SEQ ID NO: 1608 - RNA, 19 nt, artificial
  Chemically synthesized
ccuccaacccauauaacac

SEQ ID NO: 1609 - RNA, 19 nt, artificial
  Chemically synthesized
uuuguaucauucuugagca

SEQ ID NO: 1610 - RNA, 19 nt, artificial
  Chemically synthesized
gccuuuauauuugauccac

SEQ ID NO: 1611 - RNA, 19 nt, artificial
  Chemically synthesized
aggccuaccaggucccuuu

SEQ ID NO: 1612 - RNA, 19 nt, artificial
  Chemically synthesized
guucuaagcacagcucucu

SEQ ID NO: 1613 - RNA, 19 nt, artificial
  Chemically synthesized
cuguguuuuuuauuacccu

SEQ ID NO: 1614 - RNA, 19 nt, artificial
  Chemically synthesized
cuaggaagggaaggauuuu

SEQ ID NO: 1615 - RNA, 19 nt, artificial
  Chemically synthesized
cagaugggcugcgagugca

SEQ ID NO: 1616 - RNA, 19 nt, artificial
  Chemically synthesized
cuggcaucaggcaccugga

SEQ ID NO: 1617 - RNA, 19 nt, artificial
  Chemically synthesized
ugaugcuuuguaucauucu

SEQ ID NO: 1618 - RNA, 19 nt, artificial
  Chemically synthesized
aguccagccuaggaaggga

SEQ ID NO: 1619 - RNA, 19 nt, artificial
  Chemically synthesized
caaagauuaccuagcuaag

SEQ ID NO: 1620 - RNA, 19 nt, artificial
  Chemically synthesized
agaaggaaguggacucugg

SEQ ID NO: 1621 - RNA, 19 nt, artificial
  Chemically synthesized
uguacagugaccuaaaguu

SEQ ID NO: 1622 - RNA, 19 nt, artificial
  Chemically synthesized
uuaccgagaaaguucuucc

SEQ ID NO: 1623 - RNA, 19 nt, artificial
  Chemically synthesized
uaauuugaacuggagaacc

SEQ ID NO: 1624 - RNA, 19 nt, artificial
  Chemically synthesized
uauuccagcauaaacacag

SEQ ID NO: 1625 - RNA, 19 nt, artificial
  Chemically synthesized
uaugauaucaccauacagg

SEQ ID NO: 1626 - RNA, 19 nt, artificial
  Chemically synthesized
uauguuuacauaaugugcc

SEQ ID NO: 1627 - RNA, 19 nt, artificial
  Chemically synthesized
uaucaucugagaauucacc

SEQ ID NO: 1628 - RNA, 19 nt, artificial
  Chemically synthesized
auauacugaaaucacaugg

SEQ ID NO: 1629 - RNA, 19 nt, artificial
  Chemically synthesized
auuucuacaaggcucagag

SEQ ID NO: 1630 - RNA, 19 nt, artificial
  Chemically synthesized
ugaucuugcacucgcagcc

SEQ ID NO: 1631 - RNA, 19 nt, artificial
  Chemically synthesized
uauuugagcggcuuccucu

SEQ ID NO: 1632 - RNA, 19 nt, artificial
  Chemically synthesized
uugaacuggagaaccaaag

SEQ ID NO: 1633 - RNA, 19 nt, artificial
  Chemically synthesized
ucugcuugaucucauacug

SEQ ID NO: 1634 - RNA, 19 nt, artificial
  Chemically synthesized
uuuggaagcauuuugcaag

SEQ ID NO: 1635 - RNA, 19 nt, artificial
  Chemically synthesized
aagucuaauaccuaccaag

SEQ ID NO: 1636 - RNA, 19 nt, artificial
  Chemically synthesized
uucuacaaggcucagaggg

SEQ ID NO: 1637 - RNA, 19 nt, artificial
  Chemically synthesized
ugcaagucuaauaccuacc

SEQ ID NO: 1638 - RNA, 19 nt, artificial
  Chemically synthesized
auguucuucucugugaccc

SEQ ID NO: 1639 - RNA, 19 nt, artificial
  Chemically synthesized
auaucugcaacucagguuc

SEQ ID NO: 1640 - RNA, 19 nt, artificial
  Chemically synthesized
aagcugugcaacucaaucc

SEQ ID NO: 1641 - RNA, 19 nt, artificial
  Chemically synthesized
uguuacauaugauaucacc

SEQ ID NO: 1642 - RNA, 19 nt, artificial
  Chemically synthesized
auuuugaguugcuugcagg

SEQ ID NO: 1643 - RNA, 19 nt, artificial
  Chemically synthesized
guagauaaacucuauaucc

SEQ ID NO: 1644 - RNA, 19 nt, artificial
  Chemically synthesized
aagaaugauacaaagcauc

SEQ ID NO: 1645 - RNA, 19 nt, artificial
  Chemically synthesized
aauauuuugaguugcuugc

SEQ ID NO: 1646 - RNA, 19 nt, artificial
  Chemically synthesized
aacuggagaaccaaagacg

SEQ ID NO: 1647 - RNA, 19 nt, artificial
  Chemically synthesized
uguggaucaaauauaaagg

SEQ ID NO: 1648 - RNA, 19 nt, artificial
  Chemically synthesized
uuuguuuucugcucagcac

SEQ ID NO: 1649 - RNA, 19 nt, artificial
  Chemically synthesized
aaauacaagcagaaguugg

SEQ ID NO: 1650 - RNA, 19 nt, artificial
  Chemically synthesized
aauucugaggauuaauagg

SEQ ID NO: 1651 - RNA, 19 nt, artificial
  Chemically synthesized
auucuccuuaucauuaccg

SEQ ID NO: 1652 - RNA, 19 nt, artificial
  Chemically synthesized
uugugaagguauuugagcg

SEQ ID NO: 1653 - RNA, 19 nt, artificial
  Chemically synthesized
auacccucccagucugccc

SEQ ID NO: 1654 - RNA, 19 nt, artificial
  Chemically synthesized
uuuuguuuucugcucagca

SEQ ID NO: 1655 - RNA, 19 nt, artificial
  Chemically synthesized
uuccuucucacugaccgcu

SEQ ID NO: 1656 - RNA, 19 nt, artificial
  Chemically synthesized
aaagugcaagucuaauacc

SEQ ID NO: 1657 - RNA, 19 nt, artificial
  Chemically synthesized
ucagacuucauauuccagc

SEQ ID NO: 1658 - RNA, 19 nt, artificial
  Chemically synthesized
uuuaucuuuacaacacagg

SEQ ID NO: 1659 - RNA, 19 nt, artificial
  Chemically synthesized
uccauuaugacaucuuacc

SEQ ID NO: 1660 - RNA, 19 nt, artificial
  Chemically synthesized
acuggcuucaggaaaccac

SEQ ID NO: 1661 - RNA, 19 nt, artificial
  Chemically synthesized
aucauauuaauuuggaccc

SEQ ID NO: 1662 - RNA, 19 nt, artificial
  Chemically synthesized
aacaacucuuguguguucc

SEQ ID NO: 1663 - RNA, 19 nt, artificial
  Chemically synthesized
uuucuuagcuagguaaucu

SEQ ID NO: 1664 - RNA, 19 nt, artificial
  Chemically synthesized
aacucuuguguguucccag

SEQ ID NO: 1665 - RNA, 19 nt, artificial
  Chemically synthesized
uuaauuuggacccauggga

SEQ ID NO: 1666 - RNA, 19 nt, artificial
  Chemically synthesized
auaauuugaacuggagaac

SEQ ID NO: 1667 - RNA, 19 nt, artificial
  Chemically synthesized
uauuaauuuggacccaugg

SEQ ID NO: 1668 - RNA, 19 nt, artificial
  Chemically synthesized
uuuugcaagaccacgccca

SEQ ID NO: 1669 - RNA, 19 nt, artificial
  Chemically synthesized
uuguuuucugcucagcacg

SEQ ID NO: 1670 - RNA, 19 nt, artificial
  Chemically synthesized
acuuccuucucacugaccg

SEQ ID NO: 1671 - RNA, 19 nt, artificial
  Chemically synthesized
auaaugugccuguauaucg

SEQ ID NO: 1672 - RNA, 19 nt, artificial
  Chemically synthesized
aaaaguuucugcaaaaugc

SEQ ID NO: 1673 - RNA, 19 nt, artificial
  Chemically synthesized
aaaucacauggacuggucc

SEQ ID NO: 1674 - RNA, 19 nt, artificial
  Chemically synthesized
auugugaagguauuugagc

SEQ ID NO: 1675 - RNA, 19 nt, artificial
  Chemically synthesized
aauagaacaggcuaaggug

SEQ ID NO: 1676 - RNA, 19 nt, artificial
  Chemically synthesized
uaacccagcugggagaucc

SEQ ID NO: 1677 - RNA, 19 nt, artificial
  Chemically synthesized
aaaagugcaagucuaauac

SEQ ID NO: 1678 - RNA, 19 nt, artificial
  Chemically synthesized
aucucauacuggauccucu

SEQ ID NO: 1679 - RNA, 19 nt, artificial
  Chemically synthesized
ugagggaacacauagguuc

SEQ ID NO: 1680 - RNA, 19 nt, artificial
  Chemically synthesized
ugguauaucugcaacucag

SEQ ID NO: 1681 - RNA, 19 nt, artificial
  Chemically synthesized
uauugugaagguauuugag

SEQ ID NO: 1682 - RNA, 19 nt, artificial
  Chemically synthesized
auucugaggauuaauagga

SEQ ID NO: 1683 - RNA, 19 nt, artificial
  Chemically synthesized
uugcaauaauuugaacugg

SEQ ID NO: 1684 - RNA, 19 nt, artificial
  Chemically synthesized
ucauauuccagcauaaaca

SEQ ID NO: 1685 - RNA, 19 nt, artificial
  Chemically synthesized
aagucaucaagaucugugc

SEQ ID NO: 1686 - RNA, 19 nt, artificial
  Chemically synthesized
uauaucugcaacucagguu

SEQ ID NO: 1687 - RNA, 19 nt, artificial
  Chemically synthesized
uauuuugaguugcuugcag

SEQ ID NO: 1688 - RNA, 19 nt, artificial
  Chemically synthesized
ugagugugucaccaaagcc

SEQ ID NO: 1689 - RNA, 19 nt, artificial
  Chemically synthesized
ugcuacacagucuugcaac

SEQ ID NO: 1690 - RNA, 19 nt, artificial
  Chemically synthesized
uaggguugccauaaauguc

SEQ ID NO: 1691 - RNA, 19 nt, artificial
  Chemically synthesized
uaucugcuugaucucauac

SEQ ID NO: 1692 - RNA, 19 nt, artificial
  Chemically synthesized
uaaauuacggcagcaaguc

SEQ ID NO: 1693 - RNA, 19 nt, artificial
  Chemically synthesized
augagauauuccuucuuuc

SEQ ID NO: 1694 - RNA, 19 nt, artificial
  Chemically synthesized
agauauuccuucuuuccuc

SEQ ID NO: 1695 - RNA, 19 nt, artificial
  Chemically synthesized
auacuguuuauuguccacg

SEQ ID NO: 1696 - RNA, 19 nt, artificial
  Chemically synthesized
ucugcaacucagguucacc

SEQ ID NO: 1697 - RNA, 19 nt, artificial
  Chemically synthesized
ucacuucucuugaugcagg

SEQ ID NO: 1698 - RNA, 19 nt, artificial
  Chemically synthesized
uacugaaaucacauggacu

SEQ ID NO: 1699 - RNA, 19 nt, artificial
  Chemically synthesized
uacucaaagauccuuuacu

SEQ ID NO: 1700 - RNA, 19 nt, artificial
  Chemically synthesized
uucaggcucuucuucuggg

SEQ ID NO: 1701 - RNA, 19 nt, artificial
  Chemically synthesized
aaugauuacagcugauguc

SEQ ID NO: 1702 - RNA, 19 nt, artificial
  Chemically synthesized
uggcugucagucuuugagg

SEQ ID NO: 1703 - RNA, 19 nt, artificial
  Chemically synthesized
uuauuguccacggaccgag

SEQ ID NO: 1704 - RNA, 19 nt, artificial
  Chemically synthesized
acugguuccaggcugcccu

SEQ ID NO: 1705 - RNA, 19 nt, artificial
  Chemically synthesized
uacuguuuauuguccacgg

SEQ ID NO: 1706 - RNA, 19 nt, artificial
  Chemically synthesized
uugccauaaaugucguuuc

SEQ ID NO: 1707 - RNA, 19 nt, artificial
  Chemically synthesized
ucccacuggaauucugagg

SEQ ID NO: 1708 - RNA, 19 nt, artificial
  Chemically synthesized
ugauguucuucucugugac

SEQ ID NO: 1709 - RNA, 19 nt, artificial
  Chemically synthesized
uucaagaacuagccacugg

SEQ ID NO: 1710 - RNA, 19 nt, artificial
  Chemically synthesized
agaacuagccacugguucc

SEQ ID NO: 1711 - RNA, 19 nt, artificial
  Chemically synthesized
uauacugaaaucacaugga

SEQ ID NO: 1712 - RNA, 19 nt, artificial
  Chemically synthesized
aagugcaagucuaauaccu

SEQ ID NO: 1713 - RNA, 19 nt, artificial
  Chemically synthesized
uuccacucugggucaaaug

SEQ ID NO: 1714 - RNA, 19 nt, artificial
  Chemically synthesized
ugcaacucaauccaggugc

SEQ ID NO: 1715 - RNA, 19 nt, artificial
  Chemically synthesized
uugucaacuuucaacaacu

SEQ ID NO: 1716 - RNA, 19 nt, artificial
  Chemically synthesized
uuuuuuugcaguuggccac

SEQ ID NO: 1717 - RNA, 19 nt, artificial
  Chemically synthesized
auggcugucagucuuugag

SEQ ID NO: 1718 - RNA, 19 nt, artificial
  Chemically synthesized
aaaaagacucagcugaggc

SEQ ID NO: 1719 - RNA, 19 nt, artificial
  Chemically synthesized
ucaagaaugauacaaagca

SEQ ID NO: 1720 - RNA, 19 nt, artificial
  Chemically synthesized
auggagagccuucuuaaac

SEQ ID NO: 1721 - RNA, 19 nt, artificial
  Chemically synthesized
ucuuacuaugcuuagcugg

SEQ ID NO: 1722 - RNA, 19 nt, artificial
  Chemically synthesized
auuaugacaucuuaccaac

SEQ ID NO: 1723 - RNA, 19 nt, artificial
  Chemically synthesized
uaucuuuacaacacaggug

SEQ ID NO: 1724 - RNA, 19 nt, artificial
  Chemically synthesized
aaagacucagcugaggcug

SEQ ID NO: 1725 - RNA, 19 nt, artificial
  Chemically synthesized
uuuaucugcuugaucucau

SEQ ID NO: 1726 - RNA, 19 nt, artificial
  Chemically synthesized
uaaagcaaagcugugcaac

SEQ ID NO: 1727 - RNA, 19 nt, artificial
  Chemically synthesized
uccuucaagaacuagccac

SEQ ID NO: 1728 - RNA, 19 nt, artificial
  Chemically synthesized
aaagcugugcaacucaauc

SEQ ID NO: 1729 - RNA, 19 nt, artificial
  Chemically synthesized
cgaaccuacucaaagaucc

SEQ ID NO: 1730 - RNA, 19 nt, artificial
  Chemically synthesized
uuuccuccaacguccagcg

SEQ ID NO: 1731 - RNA, 19 nt, artificial
  Chemically synthesized
uaaaagaccaacgugugug

SEQ ID NO: 1732 - RNA, 19 nt, artificial
  Chemically synthesized
uucaggaaaccacacugag

SEQ ID NO: 1733 - RNA, 19 nt, artificial
  Chemically synthesized
ugugcuuagaacauaacau

SEQ ID NO: 1734 - RNA, 19 nt, artificial
  Chemically synthesized
uagaacaggcuaagguggc

SEQ ID NO: 1735 - RNA, 19 nt, artificial
  Chemically synthesized
ucaacuuucaacaacucuu

SEQ ID NO: 1736 - RNA, 19 nt, artificial
  Chemically synthesized
acucuauauccuucucagg

SEQ ID NO: 1737 - RNA, 19 nt, artificial
  Chemically synthesized
ucaagaacuagccacuggu

SEQ ID NO: 1738 - RNA, 19 nt, artificial
  Chemically synthesized
uugaguugcuugcaggaug

SEQ ID NO: 1739 - RNA, 19 nt, artificial
  Chemically synthesized
agauucuccuuaucauuac

SEQ ID NO: 1740 - RNA, 19 nt, artificial
  Chemically synthesized
uccugcaaugagauauucc

SEQ ID NO: 1741 - RNA, 19 nt, artificial
  Chemically synthesized
auuuugcaagaccacgccc

SEQ ID NO: 1742 - RNA, 19 nt, artificial
  Chemically synthesized
uuuuucuguccucaggaug

SEQ ID NO: 1743 - RNA, 19 nt, artificial
  Chemically synthesized
aauuacggcagcaagucca

SEQ ID NO: 1744 - RNA, 19 nt, artificial
  Chemically synthesized
aaagaagugagugugucac

SEQ ID NO: 1745 - RNA, 19 nt, artificial
  Chemically synthesized
aagaugucucuuaaaacag

SEQ ID NO: 1746 - RNA, 19 nt, artificial
  Chemically synthesized
uucauauuccagcauaaac

SEQ ID NO: 1747 - RNA, 19 nt, artificial
  Chemically synthesized
auacugaaaucacauggac

SEQ ID NO: 1748 - RNA, 19 nt, artificial
  Chemically synthesized
ucgaugucgagaaacuccu

SEQ ID NO: 1749 - RNA, 19 nt, artificial
  Chemically synthesized
auuaccgagaaaguucuuc

SEQ ID NO: 1750 - RNA, 19 nt, artificial
  Chemically synthesized
cacgucucccuccagaccc

SEQ ID NO: 1751 - RNA, 19 nt, artificial
  Chemically synthesized
agguauuugagcggcuucc

SEQ ID NO: 1752 - RNA, 19 nt, artificial
  Chemically synthesized
uguuuauuguccacggacc

SEQ ID NO: 1753 - RNA, 19 nt, artificial
  Chemically synthesized
uguuauauggguuggaggg

SEQ ID NO: 1754 - RNA, 19 nt, artificial
  Chemically synthesized
auuaauuuggacccauggg

SEQ ID NO: 1755 - RNA, 19 nt, artificial
  Chemically synthesized
ugagaaagaagugagugug

SEQ ID NO: 1756 - RNA, 19 nt, artificial
  Chemically synthesized
aaccuguuuuguuuucugc

SEQ ID NO: 1757 - RNA, 19 nt, artificial
  Chemically synthesized
aggauuaauaggauugaug

SEQ ID NO: 1758 - RNA, 19 nt, artificial
  Chemically synthesized
auugccacuauuuauugug

SEQ ID NO: 1759 - RNA, 19 nt, artificial
  Chemically synthesized
auuccuucuuuccuccaac

SEQ ID NO: 1760 - RNA, 19 nt, artificial
  Chemically synthesized
uggaucaaauauaaaggcc

SEQ ID NO: 1761 - RNA, 19 nt, artificial
  Chemically synthesized
uucucaggcccuuugaaca

SEQ ID NO: 1762 - RNA, 19 nt, artificial
  Chemically synthesized
uucuucucugugacccagu

SEQ ID NO: 1763 - RNA, 19 nt, artificial
  Chemically synthesized
gauucuccuuaucauuacc

SEQ ID NO: 1764 - RNA, 19 nt, artificial
  Chemically synthesized
uuucaacaacucuugugug

SEQ ID NO: 1765 - RNA, 19 nt, artificial
  Chemically synthesized
ugacccaguccauccagag

SEQ ID NO: 1766 - RNA, 19 nt, artificial
  Chemically synthesized
acauagguucccuaguucc

SEQ ID NO: 1767 - RNA, 19 nt, artificial
  Chemically synthesized
ucuccuuaucauuaccgag

SEQ ID NO: 1768 - RNA, 19 nt, artificial
  Chemically synthesized
aucaucugagaauucaccu

SEQ ID NO: 1769 - RNA, 19 nt, artificial
  Chemically synthesized
uucuccuuaucauuaccga

SEQ ID NO: 1770 - RNA, 19 nt, artificial
  Chemically synthesized
ucucacugaccgcuuuggc

SEQ ID NO: 1771 - RNA, 19 nt, artificial
  Chemically synthesized
aagaacuagccacugguuc

SEQ ID NO: 1772 - RNA, 19 nt, artificial
  Chemically synthesized
augucuaaaaggagaaggg

SEQ ID NO: 1773 - RNA, 19 nt, artificial
  Chemically synthesized
auagaacaggcuaaggugg

SEQ ID NO: 1774 - RNA, 19 nt, artificial
  Chemically synthesized
uucuggguggugcucaggg

SEQ ID NO: 1775 - RNA, 19 nt, artificial
  Chemically synthesized
uuuaggucacuguacagca

SEQ ID NO: 1776 - RNA, 19 nt, artificial
  Chemically synthesized
ugaauagaacaggcuaagg

SEQ ID NO: 1777 - RNA, 19 nt, artificial
  Chemically synthesized
aucauuaccgagaaaguuc

SEQ ID NO: 1778 - RNA, 19 nt, artificial
  Chemically synthesized
aaauccuucccuuccuagg

SEQ ID NO: 1779 - RNA, 19 nt, artificial
  Chemically synthesized
uccacuuccuucucacuga

SEQ ID NO: 1780 - RNA, 19 nt, artificial
  Chemically synthesized
aaggucucagacuucauau

SEQ ID NO: 1781 - RNA, 19 nt, artificial
  Chemically synthesized
aaugucguuuccagagucc

SEQ ID NO: 1782 - RNA, 19 nt, artificial
  Chemically synthesized
uuucuacaaggcucagagg

SEQ ID NO: 1783 - RNA, 19 nt, artificial
  Chemically synthesized
uggagagccuucuuaaacu

SEQ ID NO: 1784 - RNA, 19 nt, artificial
  Chemically synthesized
uacccucccagucugcccu

SEQ ID NO: 1785 - RNA, 19 nt, artificial
  Chemically synthesized
uucucgcucccauuucuac

SEQ ID NO: 1786 - RNA, 19 nt, artificial
  Chemically synthesized
aaauuacggcagcaagucc

SEQ ID NO: 1787 - RNA, 19 nt, artificial
  Chemically synthesized
ucauuaccgagaaaguucu

SEQ ID NO: 1788 - RNA, 19 nt, artificial
  Chemically synthesized
gauugcucaagaaugauac

SEQ ID NO: 1789 - RNA, 19 nt, artificial
  Chemically synthesized
uucuuacuaugcuuagcug

SEQ ID NO: 1790 - RNA, 19 nt, artificial
  Chemically synthesized
augucucuuaaaacaggcc

SEQ ID NO: 1791 - RNA, 19 nt, artificial
  Chemically synthesized
ucuucucugugacccaguc

SEQ ID NO: 1792 - RNA, 19 nt, artificial
  Chemically synthesized
augauacaaagcaucagag

SEQ ID NO: 1793 - RNA, 19 nt, artificial
  Chemically synthesized
aaacaggaguaaauguuac

SEQ ID NO: 1794 - RNA, 19 nt, artificial
  Chemically synthesized
uugguauaucugcaacuca

SEQ ID NO: 1795 - RNA, 19 nt, artificial
  Chemically synthesized
uaauuuggacccaugggau

SEQ ID NO: 1796 - RNA, 19 nt, artificial
  Chemically synthesized
auaaaugucguuuccagag

SEQ ID NO: 1797 - RNA, 19 nt, artificial
  Chemically synthesized
cuugaucucauacuggauc

SEQ ID NO: 1798 - RNA, 19 nt, artificial
  Chemically synthesized
aaauauaaaggccacaccu

SEQ ID NO: 1799 - RNA, 19 nt, artificial
  Chemically synthesized
auacaggaagcgaacaggg

SEQ ID NO: 1800 - RNA, 19 nt, artificial
  Chemically synthesized
ccuuggacccacgucuccc

SEQ ID NO: 1801 - RNA, 19 nt, artificial
  Chemically synthesized
auauuaauuuggacccaug

SEQ ID NO: 1802 - RNA, 19 nt, artificial
  Chemically synthesized
uguucuucucugugaccca

SEQ ID NO: 1803 - RNA, 19 nt, artificial
  Chemically synthesized
uagggaagggaccuugagg

SEQ ID NO: 1804 - RNA, 19 nt, artificial
  Chemically synthesized
aauuugaacuggagaacca

SEQ ID NO: 1805 - RNA, 19 nt, artificial
  Chemically synthesized
aucugugcugaccaggucc

SEQ ID NO: 1806 - RNA, 19 nt, artificial
  Chemically synthesized
uggacccacgucucccucc

SEQ ID NO: 1807 - RNA, 19 nt, artificial
  Chemically synthesized
aaugauacaaagcaucaga

SEQ ID NO: 1808 - RNA, 19 nt, artificial
  Chemically synthesized
aaaacaagggccauguccc

SEQ ID NO: 1809 - RNA, 19 nt, artificial
  Chemically synthesized
ugcaagaccacgcccaggc

SEQ ID NO: 1810 - RNA, 19 nt, artificial
  Chemically synthesized
aucugcauugcaaaacgcc

SEQ ID NO: 1811 - RNA, 19 nt, artificial
  Chemically synthesized
uuucagaccgaaccuacuc

SEQ ID NO: 1812 - RNA, 19 nt, artificial
  Chemically synthesized
uugaugcaggcgaagaacu

SEQ ID NO: 1813 - RNA, 19 nt, artificial
  Chemically synthesized
uuagcuagguaaucuuugu

SEQ ID NO: 1814 - RNA, 19 nt, artificial
  Chemically synthesized
uuggacccacgucucccuc

SEQ ID NO: 1815 - RNA, 19 nt, artificial
  Chemically synthesized
aaacaaucagcagaaacag

SEQ ID NO: 1816 - RNA, 19 nt, artificial
  Chemically synthesized
ugugccuguauaucgucag

SEQ ID NO: 1817 - RNA, 19 nt, artificial
  Chemically synthesized
ugcuugucaacuuucaaca

SEQ ID NO: 1818 - RNA, 19 nt, artificial
  Chemically synthesized
aauccuucccuuccuaggc

SEQ ID NO: 1819 - RNA, 19 nt, artificial
  Chemically synthesized
aagaagugagugugucacc

SEQ ID NO: 1820 - RNA, 19 nt, artificial
  Chemically synthesized
ucccauuucuacaaggcuc

SEQ ID NO: 1821 - RNA, 19 nt, artificial
  Chemically synthesized
uaaccuguuuuguuuucug

SEQ ID NO: 1822 - RNA, 19 nt, artificial
  Chemically synthesized
aaagcaucagagacaugcg

SEQ ID NO: 1823 - RNA, 19 nt, artificial
  Chemically synthesized
uagcuagguaaucuuuguc

SEQ ID NO: 1824 - RNA, 19 nt, artificial
  Chemically synthesized
auaugauaucaccauacag

SEQ ID NO: 1825 - RNA, 19 nt, artificial
  Chemically synthesized
aaaugucguuuccagaguc

SEQ ID NO: 1826 - RNA, 19 nt, artificial
  Chemically synthesized
acaccuuucagaccgaacc

SEQ ID NO: 1827 - RNA, 19 nt, artificial
  Chemically synthesized
ucagguucaccuaucaucu

SEQ ID NO: 1828 - RNA, 19 nt, artificial
  Chemically synthesized
uaaaacaggccauaguguc

SEQ ID NO: 1829 - RNA, 19 nt, artificial
  Chemically synthesized
uuggaggcuuuuuuugcag

SEQ ID NO: 1830 - RNA, 19 nt, artificial
  Chemically synthesized
uugccgcugaauagaacag

SEQ ID NO: 1831 - RNA, 19 nt, artificial
  Chemically synthesized
augaggaccuuggacccac

SEQ ID NO: 1832 - RNA, 19 nt, artificial
  Chemically synthesized
cucuauauccuucucaggc

SEQ ID NO: 1833 - RNA, 19 nt, artificial
  Chemically synthesized
uaguucccuaggaaguuuc

SEQ ID NO: 1834 - RNA, 19 nt, artificial
  Chemically synthesized
uuacuaugcuuagcuggcg

SEQ ID NO: 1835 - RNA, 19 nt, artificial
  Chemically synthesized
acccaguccauccagaggc

SEQ ID NO: 1836 - RNA, 19 nt, artificial
  Chemically synthesized
uaaugugccuguauaucgu

SEQ ID NO: 1837 - RNA, 19 nt, artificial
  Chemically synthesized
ucuucuucuggguggugcu

SEQ ID NO: 1838 - RNA, 19 nt, artificial
  Chemically synthesized
ugucagucuuugagggagg

SEQ ID NO: 1839 - RNA, 19 nt, artificial
  Chemically synthesized
agcauaaacacagugcucc

SEQ ID NO: 1840 - RNA, 19 nt, artificial
  Chemically synthesized
uuaaauuacggcagcaagu

SEQ ID NO: 1841 - RNA, 19 nt, artificial
  Chemically synthesized
ucacuggcuucaggaaacc

SEQ ID NO: 1842 - RNA, 19 nt, artificial
  Chemically synthesized
cacuuccuucucacugacc

SEQ ID NO: 1843 - RNA, 19 nt, artificial
  Chemically synthesized
uaugcuuagcuggcgucac

SEQ ID NO: 1844 - RNA, 19 nt, artificial
  Chemically synthesized
aagagauucuccuuaucau

SEQ ID NO: 1845 - RNA, 19 nt, artificial
  Chemically synthesized
uuugagggagggaacacua

SEQ ID NO: 1846 - RNA, 19 nt, artificial
  Chemically synthesized
accuuggacccacgucucc

SEQ ID NO: 1847 - RNA, 19 nt, artificial
  Chemically synthesized
ugccgcugaauagaacagg

SEQ ID NO: 1848 - RNA, 19 nt, artificial
  Chemically synthesized
ugcuugaucucauacugga

SEQ ID NO: 1849 - RNA, 19 nt, artificial
  Chemically synthesized
uggcuuuggaagcauuuug

SEQ ID NO: 1850 - RNA, 19 nt, artificial
  Chemically synthesized
uucgguuucauugcgugug

SEQ ID NO: 1851 - RNA, 19 nt, artificial
  Chemically synthesized
uaaacgaugccaaauggag

SEQ ID NO: 1852 - RNA, 19 nt, artificial
  Chemically synthesized
augucgagaaacuccugcu

SEQ ID NO: 1853 - RNA, 19 nt, artificial
  Chemically synthesized
ucaaauauaaaggccacac

SEQ ID NO: 1854 - RNA, 19 nt, artificial
  Chemically synthesized
ucugugcugaccagguccc

SEQ ID NO: 1855 - RNA, 19 nt, artificial
  Chemically synthesized
ucaggaaaccacacugagg

SEQ ID NO: 1856 - RNA, 19 nt, artificial
  Chemically synthesized
acgcguuccacucuggguc

SEQ ID NO: 1857 - RNA, 19 nt, artificial
  Chemically synthesized
aucuuuacaacacaggugg

SEQ ID NO: 1858 - RNA, 19 nt, artificial
  Chemically synthesized
uuaucuuuacaacacaggu

SEQ ID NO: 1859 - RNA, 19 nt, artificial
  Chemically synthesized
uacaucugcauugcaaaac

SEQ ID NO: 1860 - RNA, 19 nt, artificial
  Chemically synthesized
aacccuuggaggcuuuuuu

SEQ ID NO: 1861 - RNA, 19 nt, artificial
  Chemically synthesized
uucccuaggaaguuucuua

SEQ ID NO: 1862 - RNA, 19 nt, artificial
  Chemically synthesized
uccacucugggucaaaugc

SEQ ID NO: 1863 - RNA, 19 nt, artificial
  Chemically synthesized
agggaagggaccuugaggg

SEQ ID NO: 1864 - RNA, 19 nt, artificial
  Chemically synthesized
ugaucucauacuggauccu

SEQ ID NO: 1865 - RNA, 19 nt, artificial
  Chemically synthesized
uucuuagcuagguaaucuu

SEQ ID NO: 1866 - RNA, 19 nt, artificial
  Chemically synthesized
acacugagggaacacauag

SEQ ID NO: 1867 - RNA, 19 nt, artificial
  Chemically synthesized
uugagcggcuuccucuguc

SEQ ID NO: 1868 - RNA, 19 nt, artificial
  Chemically synthesized
aaauggagagccuucuuaa

SEQ ID NO: 1869 - RNA, 19 nt, artificial
  Chemically synthesized
aaacaagagauucuccuua

SEQ ID NO: 1870 - RNA, 19 nt, artificial
  Chemically synthesized
aucacuggcuucaggaaac

SEQ ID NO: 1871 - RNA, 19 nt, artificial
  Chemically synthesized
uucuucuggguggugcuca

SEQ ID NO: 1872 - RNA, 19 nt, artificial
  Chemically synthesized
gaauucugaggauuaauag

SEQ ID NO: 1873 - RNA, 19 nt, artificial
  Chemically synthesized
uuugcaagaccacgcccag

SEQ ID NO: 1874 - RNA, 19 nt, artificial
  Chemically synthesized
gauauuccuucuuuccucc

SEQ ID NO: 1875 - RNA, 19 nt, artificial
  Chemically synthesized
augcaggcgaagaacuugg

SEQ ID NO: 1876 - RNA, 19 nt, artificial
  Chemically synthesized
aaaaacaaucagcagaaac

SEQ ID NO: 1877 - RNA, 19 nt, artificial
  Chemically synthesized
gggaugaggaccuuggacc

SEQ ID NO: 1878 - RNA, 19 nt, artificial
  Chemically synthesized
uuaugacaucuuaccaacu

SEQ ID NO: 1879 - RNA, 19 nt, artificial
  Chemically synthesized
gucucagacuucauauucc

SEQ ID NO: 1880 - RNA, 19 nt, artificial
  Chemically synthesized
uaggccacgcguuccacuc

SEQ ID NO: 1881 - RNA, 19 nt, artificial
  Chemically synthesized
ucccuccagacccacaacc

SEQ ID NO: 1882 - RNA, 19 nt, artificial
  Chemically synthesized
aaacggaaacaaaaucaac

SEQ ID NO: 1883 - RNA, 19 nt, artificial
  Chemically synthesized
uuccagcauaaacacagug

SEQ ID NO: 1884 - RNA, 19 nt, artificial
  Chemically synthesized
ugaggcuggaacgcagcuc

SEQ ID NO: 1885 - RNA, 19 nt, artificial
  Chemically synthesized
cuucucugugacccagucc

SEQ ID NO: 1886 - RNA, 19 nt, artificial
  Chemically synthesized
cuucuuacuaugcuuagcu

SEQ ID NO: 1887 - RNA, 19 nt, artificial
  Chemically synthesized
acuuucaacaacucuugug

SEQ ID NO: 1888 - RNA, 19 nt, artificial
  Chemically synthesized
aucaagaucugugcugacc

SEQ ID NO: 1889 - RNA, 19 nt, artificial
  Chemically synthesized
ugagaauucaccuuuagaa

SEQ ID NO: 1890 - RNA, 19 nt, artificial
  Chemically synthesized
auagguucccuaguucccu

SEQ ID NO: 1891 - RNA, 19 nt, artificial
  Chemically synthesized
guuuccagaguccacuucc

SEQ ID NO: 1892 - RNA, 19 nt, artificial
  Chemically synthesized
uuacaacacaggugggagg

SEQ ID NO: 1893 - RNA, 19 nt, artificial
  Chemically synthesized
auccagaggcacucguccg

SEQ ID NO: 1894 - RNA, 19 nt, artificial
  Chemically synthesized
ugggucaaaugcuuccacg

SEQ ID NO: 1895 - RNA, 19 nt, artificial
  Chemically synthesized
uccagcauaaacacagugc

SEQ ID NO: 1896 - RNA, 19 nt, artificial
  Chemically synthesized
aguugguauaucugcaacu

SEQ ID NO: 1897 - RNA, 19 nt, artificial
  Chemically synthesized
agagauucuccuuaucauu

SEQ ID NO: 1898 - RNA, 19 nt, artificial
  Chemically synthesized
uuuaaauuacggcagcaag

SEQ ID NO: 1899 - RNA, 19 nt, artificial
  Chemically synthesized
aggaaacaagagauucucc

SEQ ID NO: 1900 - RNA, 19 nt, artificial
  Chemically synthesized
agucuaauaccuaccaagg

SEQ ID NO: 1901 - RNA, 19 nt, artificial
  Chemically synthesized
cuucuuuccuccaacgucc

SEQ ID NO: 1902 - RNA, 19 nt, artificial
  Chemically synthesized
uuccuucuuuccuccaacg

SEQ ID NO: 1903 - RNA, 19 nt, artificial
  Chemically synthesized
uuccaggaagggaugucag

SEQ ID NO: 1904 - RNA, 19 nt, artificial
  Chemically synthesized
uuuccaggaagggauguca

SEQ ID NO: 1905 - RNA, 19 nt, artificial
  Chemically synthesized
aagcagaaguugguauauc

SEQ ID NO: 1906 - RNA, 19 nt, artificial
  Chemically synthesized
uugcacucgcagcccaucu

SEQ ID NO: 1907 - RNA, 19 nt, artificial
  Chemically synthesized
agggagggaacacuaagcc

SEQ ID NO: 1908 - RNA, 19 nt, artificial
  Chemically synthesized
acauaugauaucaccauac

SEQ ID NO: 1909 - RNA, 19 nt, artificial
  Chemically synthesized
aauacaagcagaaguuggu

SEQ ID NO: 1910 - RNA, 19 nt, artificial
  Chemically synthesized
aggcugagaaagaagugag

SEQ ID NO: 1911 - RNA, 19 nt, artificial
  Chemically synthesized
uuuacaacacaggugggag

SEQ ID NO: 1912 - RNA, 19 nt, artificial
  Chemically synthesized
ccaacguccagcgagaccc

SEQ ID NO: 1913 - RNA, 19 nt, artificial
  Chemically synthesized
aaggcucagagggaggcuc

SEQ ID NO: 1914 - RNA, 19 nt, artificial
  Chemically synthesized
caaagcaucagagacaugc

SEQ ID NO: 1915 - RNA, 19 nt, artificial
  Chemically synthesized
uguacagcaugaaaacgcc

SEQ ID NO: 1916 - RNA, 19 nt, artificial
  Chemically synthesized
uacaagcagaaguugguau

SEQ ID NO: 1917 - RNA, 19 nt, artificial
  Chemically synthesized
aucacuacaucugcauugc

SEQ ID NO: 1918 - RNA, 19 nt, artificial
  Chemically synthesized
aagaaauacaagcagaagu

SEQ ID NO: 1919 - RNA, 19 nt, artificial
  Chemically synthesized
ugcaauaauuugaacugga

SEQ ID NO: 1920 - RNA, 19 nt, artificial
  Chemically synthesized
aagaucugugcugaccagg

SEQ ID NO: 1921 - RNA, 19 nt, artificial
  Chemically synthesized
aacggaaacaaaaucaaca

SEQ ID NO: 1922 - RNA, 19 nt, artificial
  Chemically synthesized
agaaguugguauaucugca

SEQ ID NO: 1923 - RNA, 19 nt, artificial
  Chemically synthesized
cuuccuucucacugaccgc

SEQ ID NO: 1924 - RNA, 19 nt, artificial
  Chemically synthesized
cauuuugcaagaccacgcc

SEQ ID NO: 1925 - RNA, 19 nt, artificial
  Chemically synthesized
uucccuuccuaggcuggac

SEQ ID NO: 1926 - RNA, 19 nt, artificial
  Chemically synthesized
uuaucauuaccgagaaagu

SEQ ID NO: 1927 - RNA, 19 nt, artificial
  Chemically synthesized
uaagaaauacaagcagaag

SEQ ID NO: 1928 - RNA, 19 nt, artificial
  Chemically synthesized
auuugagcggcuuccucug

SEQ ID NO: 1929 - RNA, 19 nt, artificial
  Chemically synthesized
uccagaguccacuuccuuc

SEQ ID NO: 1930 - RNA, 19 nt, artificial
  Chemically synthesized
guccacuuccuucucacug

SEQ ID NO: 1931 - RNA, 19 nt, artificial
  Chemically synthesized
ugcccuagaaagggaaguc

SEQ ID NO: 1932 - RNA, 19 nt, artificial
  Chemically synthesized
uacaaggcucagagggagg

SEQ ID NO: 1933 - RNA, 19 nt, artificial
  Chemically synthesized
uaggucacuguacagcaug

SEQ ID NO: 1934 - RNA, 19 nt, artificial
  Chemically synthesized
aguccauccagaggcacuc

SEQ ID NO: 1935 - RNA, 19 nt, artificial
  Chemically synthesized
uuccuggauacccucccag

SEQ ID NO: 1936 - RNA, 19 nt, artificial
  Chemically synthesized
uuuucugcucagcacgguu

SEQ ID NO: 1937 - RNA, 19 nt, artificial
  Chemically synthesized
acugaaaucacauggacug

SEQ ID NO: 1938 - RNA, 19 nt, artificial
  Chemically synthesized
agacccacaaccaugucua

SEQ ID NO: 1939 - RNA, 19 nt, artificial
  Chemically synthesized
aagcaucagagacaugcgc

SEQ ID NO: 1940 - RNA, 19 nt, artificial
  Chemically synthesized
ucaucugagaauucaccuu

SEQ ID NO: 1941 - RNA, 19 nt, artificial
  Chemically synthesized
ugcccguugauguucuucu

SEQ ID NO: 1942 - RNA, 19 nt, artificial
  Chemically synthesized
uuucauugcguguguaugu

SEQ ID NO: 1943 - RNA, 19 nt, artificial
  Chemically synthesized
gaagucaucaagaucugug

SEQ ID NO: 1944 - RNA, 19 nt, artificial
  Chemically synthesized
ugaagguauuugagcggcu

SEQ ID NO: 1945 - RNA, 19 nt, artificial
  Chemically synthesized
cugcuugaucucauacugg

SEQ ID NO: 1946 - RNA, 19 nt, artificial
  Chemically synthesized
gaguccacuuccuucucac

SEQ ID NO: 1947 - RNA, 19 nt, artificial
  Chemically synthesized
gaauagaacaggcuaaggu

SEQ ID NO: 1948 - RNA, 19 nt, artificial
  Chemically synthesized
aacaaucagcagaaacagg

SEQ ID NO: 1949 - RNA, 19 nt, artificial
  Chemically synthesized
acaggcaagaagcaauggc

SEQ ID NO: 1950 - RNA, 19 nt, artificial
  Chemically synthesized
aaaaugcacauuuccaggc

SEQ ID NO: 1951 - RNA, 19 nt, artificial
  Chemically synthesized
uaggagaagagagcugugc

SEQ ID NO: 1952 - RNA, 19 nt, artificial
  Chemically synthesized
aggguugccauaaaugucg

SEQ ID NO: 1953 - RNA, 19 nt, artificial
  Chemically synthesized
auaaaaaacacagcacagg

SEQ ID NO: 1954 - RNA, 19 nt, artificial
  Chemically synthesized
uuuccagaguccacuuccu

SEQ ID NO: 1955 - RNA, 19 nt, artificial
  Chemically synthesized
acuucuuacuaugcuuagc

SEQ ID NO: 1956 - RNA, 19 nt, artificial
  Chemically synthesized
acuggagaaccaaagacgg

SEQ ID NO: 1957 - RNA, 19 nt, artificial
  Chemically synthesized
uaucacuggcuucaggaaa

SEQ ID NO: 1958 - RNA, 19 nt, artificial
  Chemically synthesized
ggaccuuggacccacgucu

SEQ ID NO: 1959 - RNA, 19 nt, artificial
  Chemically synthesized
auaggguugccauaaaugu

SEQ ID NO: 1960 - RNA, 19 nt, artificial
  Chemically synthesized
aauacuguuuauuguccac

SEQ ID NO: 1961 - RNA, 19 nt, artificial
  Chemically synthesized
acaacucuuguguguuccc

SEQ ID NO: 1962 - RNA, 19 nt, artificial
  Chemically synthesized
uauuguccacggaccgagc

SEQ ID NO: 1963 - RNA, 19 nt, artificial
  Chemically synthesized
uguuuucugcucagcacgg

SEQ ID NO: 1964 - RNA, 19 nt, artificial
  Chemically synthesized
ugugaagguauuugagcgg

SEQ ID NO: 1965 - RNA, 19 nt, artificial
  Chemically synthesized
agucuuugagggagggaac

SEQ ID NO: 1966 - RNA, 19 nt, artificial
  Chemically synthesized
acacagucuugcaacgacc

SEQ ID NO: 1967 - RNA, 19 nt, artificial
  Chemically synthesized
cuuguguguucccagcacc

SEQ ID NO: 1968 - RNA, 19 nt, artificial
  Chemically synthesized
ugguggaguuguauauacu

SEQ ID NO: 1969 - RNA, 19 nt, artificial
  Chemically synthesized
aauccaggugccugaugcc

SEQ ID NO: 1970 - RNA, 19 nt, artificial
  Chemically synthesized
uugaacaucuuuaucugcu

SEQ ID NO: 1971 - RNA, 19 nt, artificial
  Chemically synthesized
ucucagacuucauauucca

SEQ ID NO: 1972 - RNA, 19 nt, artificial
  Chemically synthesized
aacucaauccaggugccug

SEQ ID NO: 1973 - RNA, 19 nt, artificial
  Chemically synthesized
aacaagagauucuccuuau

SEQ ID NO: 1974 - RNA, 19 nt, artificial
  Chemically synthesized
gaugucucuuaaaacaggc

SEQ ID NO: 1975 - RNA, 19 nt, artificial
  Chemically synthesized
uaucaccauacaggaagcg

SEQ ID NO: 1976 - RNA, 19 nt, artificial
  Chemically synthesized
uuggcaucugugacggugc

SEQ ID NO: 1977 - RNA, 19 nt, artificial
  Chemically synthesized
acucagcugaggcuggaac

SEQ ID NO: 1978 - RNA, 19 nt, artificial
  Chemically synthesized
accaaagccaccuaccucc

SEQ ID NO: 1979 - RNA, 19 nt, artificial
  Chemically synthesized
ugccauaaaugucguuucc

SEQ ID NO: 1980 - RNA, 19 nt, artificial
  Chemically synthesized
agggugaugugcaucuugc

SEQ ID NO: 1981 - RNA, 19 nt, artificial
  Chemically synthesized
ucucgcucccauuucuaca

SEQ ID NO: 1982 - RNA, 19 nt, artificial
  Chemically synthesized
gaauccaccugcauaggcc

SEQ ID NO: 1983 - RNA, 19 nt, artificial
  Chemically synthesized
ugugguucaggcucuucuu

SEQ ID NO: 1984 - RNA, 19 nt, artificial
  Chemically synthesized
gauuccuggauacccuccc

SEQ ID NO: 1985 - RNA, 19 nt, artificial
  Chemically synthesized
uggacugguccauuaugac

SEQ ID NO: 1986 - RNA, 19 nt, artificial
  Chemically synthesized
gaugggaugaggaccuugg

SEQ ID NO: 1987 - RNA, 19 nt, artificial
  Chemically synthesized
ugugucaccaaagccaccu

SEQ ID NO: 1988 - RNA, 19 nt, artificial
  Chemically synthesized
uaggccugcuacacagucu

SEQ ID NO: 1989 - RNA, 19 nt, artificial
  Chemically synthesized
aaaugcacauuuccaggcc

SEQ ID NO: 1990 - RNA, 19 nt, artificial
  Chemically synthesized
aguucuuccuauccuaacc

SEQ ID NO: 1991 - RNA, 19 nt, artificial
  Chemically synthesized
gcuccuucaagaacuagcc

SEQ ID NO: 1992 - RNA, 19 nt, artificial
  Chemically synthesized
aaacaaaaucaacagagcu

SEQ ID NO: 1993 - RNA, 19 nt, artificial
  Chemically synthesized
aaaguuucugcaaaaugca

SEQ ID NO: 1994 - RNA, 19 nt, artificial
  Chemically synthesized
aaggccacaccuuucagac

SEQ ID NO: 1995 - RNA, 19 nt, artificial
  Chemically synthesized
uccaggcugcccuuggaug

SEQ ID NO: 1996 - RNA, 19 nt, artificial
  Chemically synthesized
aaaacaaucagcagaaaca

SEQ ID NO: 1997 - RNA, 19 nt, artificial
  Chemically synthesized
auauuuugaguugcuugca

SEQ ID NO: 1998 - RNA, 19 nt, artificial
  Chemically synthesized
agaaacaggaguaaauguu

SEQ ID NO: 1999 - RNA, 19 nt, artificial
  Chemically synthesized
uauaaaggccacaccuuuc

SEQ ID NO: 2000 - RNA, 19 nt, artificial
  Chemically synthesized
acaaucagcagaaacagga

SEQ ID NO: 2001 - RNA, 19 nt, artificial
  Chemically synthesized
uucugaggauuaauaggau

SEQ ID NO: 2002 - RNA, 19 nt, artificial
  Chemically synthesized
cauaucacuggcuucagga

SEQ ID NO: 2003 - RNA, 19 nt, artificial
  Chemically synthesized
uauauccuucucaggcccu

SEQ ID NO: 2004 - RNA, 19 nt, artificial
  Chemically synthesized
aaguugguauaucugcaac

SEQ ID NO: 2005 - RNA, 19 nt, artificial
  Chemically synthesized
cuauauccuucucaggccc

SEQ ID NO: 2006 - RNA, 19 nt, artificial
  Chemically synthesized
uacagcaugaaaacgcccg

SEQ ID NO: 2007 - RNA, 19 nt, artificial
  Chemically synthesized
ugaaaucacauggacuggu

SEQ ID NO: 2008 - RNA, 19 nt, artificial
  Chemically synthesized
ugaggaccuuggacccacg

SEQ ID NO: 2009 - RNA, 19 nt, artificial
  Chemically synthesized
cuagccacugguuccaggc

SEQ ID NO: 2010 - RNA, 19 nt, artificial
  Chemically synthesized
ucccucucaagaugaaagg

SEQ ID NO: 2011 - RNA, 19 nt, artificial
  Chemically synthesized
agagggaggcucccacugg

SEQ ID NO: 2012 - RNA, 19 nt, artificial
  Chemically synthesized
uucugcaaaaugcacauuu

SEQ ID NO: 2013 - RNA, 19 nt, artificial
  Chemically synthesized
ucaagaucugugcugacca

SEQ ID NO: 2014 - RNA, 19 nt, artificial
  Chemically synthesized
aaggaauccaccugcauag

SEQ ID NO: 2015 - RNA, 19 nt, artificial
  Chemically synthesized
cuaggcuggacuucuuacu

SEQ ID NO: 2016 - RNA, 19 nt, artificial
  Chemically synthesized
uuuggacccaugggaugag

SEQ ID NO: 2017 - RNA, 19 nt, artificial
  Chemically synthesized
ucagcugccacccggcucu

SEQ ID NO: 2018 - RNA, 19 nt, artificial
  Chemically synthesized
acucuuguguguucccagc

SEQ ID NO: 2019 - RNA, 19 nt, artificial
  Chemically synthesized
uccagaggcacucguccgg

SEQ ID NO: 2020 - RNA, 19 nt, artificial
  Chemically synthesized
caggaaaccacacugaggg

SEQ ID NO: 2021 - RNA, 19 nt, artificial
  Chemically synthesized
aaagcaaagcugugcaacu

SEQ ID NO: 2022 - RNA, 19 nt, artificial
  Chemically synthesized
uuggaggccugcuuauggg

SEQ ID NO: 2023 - RNA, 19 nt, artificial
  Chemically synthesized
uuguguguucccagcaccg

SEQ ID NO: 2024 - RNA, 19 nt, artificial
  Chemically synthesized
cugaugucaaaaacaaacc

SEQ ID NO: 2025 - RNA, 19 nt, artificial
  Chemically synthesized
aaugugccuguauaucguc

SEQ ID NO: 2026 - RNA, 19 nt, artificial
  Chemically synthesized
ugagggagggaacacuaag

SEQ ID NO: 2027 - RNA, 19 nt, artificial
  Chemically synthesized
agaaagaagugaguguguc

SEQ ID NO: 2028 - RNA, 19 nt, artificial
  Chemically synthesized
aagguauuugagcggcuuc

SEQ ID NO: 2029 - RNA, 19 nt, artificial
  Chemically synthesized
ucucaagaugaaagggacc

SEQ ID NO: 2030 - RNA, 19 nt, artificial
  Chemically synthesized
acuagccacugguuccagg

SEQ ID NO: 2031 - RNA, 19 nt, artificial
  Chemically synthesized
uggaguuguauauacugaa

SEQ ID NO: 2032 - RNA, 19 nt, artificial
  Chemically synthesized
acugagggaacacauaggu

SEQ ID NO: 2033 - RNA, 19 nt, artificial
  Chemically synthesized
ugcaggaugaaaauaggag

SEQ ID NO: 2034 - RNA, 19 nt, artificial
  Chemically synthesized
uucaacaacucuugugugu

SEQ ID NO: 2035 - RNA, 19 nt, artificial
  Chemically synthesized
auacaaagcaucagagaca

SEQ ID NO: 2036 - RNA, 19 nt, artificial
  Chemically synthesized
uuucucgcucccauuucua

SEQ ID NO: 2037 - RNA, 19 nt, artificial
  Chemically synthesized
acucugggucaaaugcuuc

SEQ ID NO: 2038 - RNA, 19 nt, artificial
  Chemically synthesized
uacagcugaugucaaaaac

SEQ ID NO: 2039 - RNA, 19 nt, artificial
  Chemically synthesized
cucgaugucgagaaacucc

SEQ ID NO: 2040 - RNA, 19 nt, artificial
  Chemically synthesized
uguauaucgucaguuuauc

SEQ ID NO: 2041 - RNA, 19 nt, artificial
  Chemically synthesized
ucuuugagggagggaacac

SEQ ID NO: 2042 - RNA, 19 nt, artificial
  Chemically synthesized
aaauccaaacggaaacaaa

SEQ ID NO: 2043 - RNA, 19 nt, artificial
  Chemically synthesized
agaccaaaaagacucagcu

SEQ ID NO: 2044 - RNA, 19 nt, artificial
  Chemically synthesized
uaucauuaccgagaaaguu

SEQ ID NO: 2045 - RNA, 19 nt, artificial
  Chemically synthesized
ucugucagcugccacccgg

SEQ ID NO: 2046 - RNA, 19 nt, artificial
  Chemically synthesized
aagcaaagcugugcaacuc

SEQ ID NO: 2047 - RNA, 19 nt, artificial
  Chemically synthesized
ugugcugaccaggucccgg

SEQ ID NO: 2048 - RNA, 19 nt, artificial
  Chemically synthesized
ucaaagauccuuuacuuug

SEQ ID NO: 2049 - RNA, 19 nt, artificial
  Chemically synthesized
aaauaggagaagagagcug

SEQ ID NO: 2050 - RNA, 19 nt, artificial
  Chemically synthesized
agacccagcuuuuucuguc

SEQ ID NO: 2051 - RNA, 19 nt, artificial
  Chemically synthesized
uuagcuggcgucacaugca

SEQ ID NO: 2052 - RNA, 19 nt, artificial
  Chemically synthesized
aagacucagcugaggcugg

SEQ ID NO: 2053 - RNA, 19 nt, artificial
  Chemically synthesized
aucuuaccaacuuuagguc

SEQ ID NO: 2054 - RNA, 19 nt, artificial
  Chemically synthesized
caaauauaaaggccacacc

SEQ ID NO: 2055 - RNA, 19 nt, artificial
  Chemically synthesized
ugggaugaggaccuuggac

SEQ ID NO: 2056 - RNA, 19 nt, artificial
  Chemically synthesized
uaggcuggacuucuuacua

SEQ ID NO: 2057 - RNA, 19 nt, artificial
  Chemically synthesized
uggacuucuuacuaugcuu

SEQ ID NO: 2058 - RNA, 19 nt, artificial
  Chemically synthesized
agaaaguucuuccuauccu

SEQ ID NO: 2059 - RNA, 19 nt, artificial
  Chemically synthesized
ggaaacaagagauucuccu

SEQ ID NO: 2060 - RNA, 19 nt, artificial
  Chemically synthesized
caacuuucaacaacucuug

SEQ ID NO: 2061 - RNA, 19 nt, artificial
  Chemically synthesized
uguagcacgggaucauggg

SEQ ID NO: 2062 - RNA, 19 nt, artificial
  Chemically synthesized
aauuuggacccaugggaug

SEQ ID NO: 2063 - RNA, 19 nt, artificial
  Chemically synthesized
uguuuuguuuucugcucag

SEQ ID NO: 2064 - RNA, 19 nt, artificial
  Chemically synthesized
accuguuuuguuuucugcu

SEQ ID NO: 2065 - RNA, 19 nt, artificial
  Chemically synthesized
acaggugggaggaaacaag

SEQ ID NO: 2066 - RNA, 19 nt, artificial
  Chemically synthesized
ugucguuuccagaguccac

SEQ ID NO: 2067 - RNA, 19 nt, artificial
  Chemically synthesized
caagagauucuccuuauca

SEQ ID NO: 2068 - RNA, 19 nt, artificial
  Chemically synthesized
uucagaccgaaccuacuca

SEQ ID NO: 2069 - RNA, 19 nt, artificial
  Chemically synthesized
aauuaaacgaugccaaaug

SEQ ID NO: 2070 - RNA, 19 nt, artificial
  Chemically synthesized
auaucaccauacaggaagc

SEQ ID NO: 2071 - RNA, 19 nt, artificial
  Chemically synthesized
gaucucauacuggauccuc

SEQ ID NO: 2072 - RNA, 19 nt, artificial
  Chemically synthesized
uucuguccucaggaugugc

SEQ ID NO: 2073 - RNA, 19 nt, artificial
  Chemically synthesized
augaguguuuuauucaugc

SEQ ID NO: 2074 - RNA, 19 nt, artificial
  Chemically synthesized
auugcaaaacgccuguugc

SEQ ID NO: 2075 - RNA, 19 nt, artificial
  Chemically synthesized
augugcaucuugccguccc

SEQ ID NO: 2076 - RNA, 19 nt, artificial
  Chemically synthesized
agcacaggaaugauuacag

SEQ ID NO: 2077 - RNA, 19 nt, artificial
  Chemically synthesized
ucagcacgguuaaaagacc

SEQ ID NO: 2078 - RNA, 19 nt, artificial
  Chemically synthesized
aauaggagaagagagcugu

SEQ ID NO: 2079 - RNA, 19 nt, artificial
  Chemically synthesized
ucuaauaccuaccaagggu

SEQ ID NO: 2080 - RNA, 19 nt, artificial
  Chemically synthesized
ugucagagcuggaccaguc

SEQ ID NO: 2081 - RNA, 19 nt, artificial
  Chemically synthesized
uuugaguugcuugcaggau

SEQ ID NO: 2082 - RNA, 19 nt, artificial
  Chemically synthesized
auguagcacgggaucaugg

SEQ ID NO: 2083 - RNA, 19 nt, artificial
  Chemically synthesized
uugcucaagaaugauacaa

SEQ ID NO: 2084 - RNA, 19 nt, artificial
  Chemically synthesized
gugcagaccaaaaagacuc

SEQ ID NO: 2085 - RNA, 19 nt, artificial
  Chemically synthesized
cuucucaggcccuuugaac

SEQ ID NO: 2086 - RNA, 19 nt, artificial
  Chemically synthesized
aaaagacucagcugaggcu

SEQ ID NO: 2087 - RNA, 19 nt, artificial
  Chemically synthesized
acaagagauucuccuuauc

SEQ ID NO: 2088 - RNA, 19 nt, artificial
  Chemically synthesized
aagucacagagggugaugu

SEQ ID NO: 2089 - RNA, 19 nt, artificial
  Chemically synthesized
gcauuuugcaagaccacgc

SEQ ID NO: 2090 - RNA, 19 nt, artificial
  Chemically synthesized
ucugugacggugccaaggc

SEQ ID NO: 2091 - RNA, 19 nt, artificial
  Chemically synthesized
cugugguucaggcucuucu

SEQ ID NO: 2092 - RNA, 19 nt, artificial
  Chemically synthesized
ugucucuuaaaacaggcca

SEQ ID NO: 2093 - RNA, 19 nt, artificial
  Chemically synthesized
uaccuccaaaauccuuccc

SEQ ID NO: 2094 - RNA, 19 nt, artificial
  Chemically synthesized
uuugcaguuggccacaggg

SEQ ID NO: 2095 - RNA, 19 nt, artificial
  Chemically synthesized
cuuaucauuaccgagaaag

SEQ ID NO: 2096 - RNA, 19 nt, artificial
  Chemically synthesized
uggacccaugggaugagug

SEQ ID NO: 2097 - RNA, 19 nt, artificial
  Chemically synthesized
uccucugucagcugccacc

SEQ ID NO: 2098 - RNA, 19 nt, artificial
  Chemically synthesized
cuaucaucugagaauucac

SEQ ID NO: 2099 - RNA, 19 nt, artificial
  Chemically synthesized
uuuugaguugcuugcagga

SEQ ID NO: 2100 - RNA, 19 nt, artificial
  Chemically synthesized
agaugucucuuaaaacagg

SEQ ID NO: 2101 - RNA, 19 nt, artificial
  Chemically synthesized
cacugguuccaggcugccc

SEQ ID NO: 2102 - RNA, 19 nt, artificial
  Chemically synthesized
caauccaggugccugaugc

SEQ ID NO: 2103 - RNA, 19 nt, artificial
  Chemically synthesized
uagccacugguuccaggcu

SEQ ID NO: 2104 - RNA, 19 nt, artificial
  Chemically synthesized
ucacagagggugaugugca

SEQ ID NO: 2105 - RNA, 19 nt, artificial
  Chemically synthesized
agcagaaguugguauaucu

SEQ ID NO: 2106 - RNA, 19 nt, artificial
  Chemically synthesized
uaggaaguuucuuagcuag

SEQ ID NO: 2107 - RNA, 19 nt, artificial
  Chemically synthesized
ugaaaauaggagaagagag

SEQ ID NO: 2108 - RNA, 19 nt, artificial
  Chemically synthesized
uuccaggcugcccuuggau

SEQ ID NO: 2109 - RNA, 19 nt, artificial
  Chemically synthesized
accuacucaaagauccuuu

SEQ ID NO: 2110 - RNA, 19 nt, artificial
  Chemically synthesized
ucuucuggguggugcucag

SEQ ID NO: 2111 - RNA, 19 nt, artificial
  Chemically synthesized
ugccugaugccagaacagg

SEQ ID NO: 2112 - RNA, 19 nt, artificial
  Chemically synthesized
auauuccagcauaaacaca

SEQ ID NO: 2113 - RNA, 19 nt, artificial
  Chemically synthesized
uaccgagaaaguucuuccu

SEQ ID NO: 2114 - RNA, 19 nt, artificial
  Chemically synthesized
uaccugugguucaggcucu

SEQ ID NO: 2115 - RNA, 19 nt, artificial
  Chemically synthesized
uaagugcugccugcuuggc

SEQ ID NO: 2116 - RNA, 19 nt, artificial
  Chemically synthesized
cgucacaugcagaaagccc

SEQ ID NO: 2117 - RNA, 19 nt, artificial
  Chemically synthesized
ucaggcucuucuucugggu

SEQ ID NO: 2118 - RNA, 19 nt, artificial
  Chemically synthesized
acuucucuugaugcaggcg

SEQ ID NO: 2119 - RNA, 19 nt, artificial
  Chemically synthesized
cagaaguugguauaucugc

SEQ ID NO: 2120 - RNA, 19 nt, artificial
  Chemically synthesized
aaucacauggacuggucca

SEQ ID NO: 2121 - RNA, 19 nt, artificial
  Chemically synthesized
aacaggaguaaauguuaca

SEQ ID NO: 2122 - RNA, 19 nt, artificial
  Chemically synthesized
acaggaaugauuacagcug

SEQ ID NO: 2123 - RNA, 19 nt, artificial
  Chemically synthesized
ugucaacuuucaacaacuc

SEQ ID NO: 2124 - RNA, 19 nt, artificial
  Chemically synthesized
ucagagacaugcgcagucu

SEQ ID NO: 2125 - RNA, 19 nt, artificial
  Chemically synthesized
uaaaaaacacagcacagga

SEQ ID NO: 2126 - RNA, 19 nt, artificial
  Chemically synthesized
caugucuaaaaggagaagg

SEQ ID NO: 2127 - RNA, 19 nt, artificial
  Chemically synthesized
ucccuaggaaguuucuuag

SEQ ID NO: 2128 - RNA, 19 nt, artificial
  Chemically synthesized
ugcaggcgaagaacuuggc

SEQ ID NO: 2129 - RNA, 19 nt, artificial
  Chemically synthesized
cuuuccuccaacguccagc

SEQ ID NO: 2130 - RNA, 19 nt, artificial
  Chemically synthesized
ucugcauugcaaaacgccu

SEQ ID NO: 2131 - RNA, 19 nt, artificial
  Chemically synthesized
aguuucugcaaaaugcaca

SEQ ID NO: 2132 - RNA, 19 nt, artificial
  Chemically synthesized
agccacugguuccaggcug

SEQ ID NO: 2133 - RNA, 19 nt, artificial
  Chemically synthesized
ccuuggaggcuuuuuuugc

SEQ ID NO: 2134 - RNA, 19 nt, artificial
  Chemically synthesized
ugugcaacucaauccaggu

SEQ ID NO: 2135 - RNA, 19 nt, artificial
  Chemically synthesized
aacagagcuuuaaauuacg

SEQ ID NO: 2136 - RNA, 19 nt, artificial
  Chemically synthesized
aauaaaaaacacagcacag

SEQ ID NO: 2137 - RNA, 19 nt, artificial
  Chemically synthesized
aagaacuuggccuggugcc

SEQ ID NO: 2138 - RNA, 19 nt, artificial
  Chemically synthesized
uuuugcaguuggccacagg

SEQ ID NO: 2139 - RNA, 19 nt, artificial
  Chemically synthesized
agcuggaccagucgaaacc

SEQ ID NO: 2140 - RNA, 19 nt, artificial
  Chemically synthesized
ugggaugaguguuuuauuc

SEQ ID NO: 2141 - RNA, 19 nt, artificial
  Chemically synthesized
guugguauaucugcaacuc

SEQ ID NO: 2142 - RNA, 19 nt, artificial
  Chemically synthesized
gauaucaccauacaggaag

SEQ ID NO: 2143 - RNA, 19 nt, artificial
  Chemically synthesized
uuugaacuggagaaccaaa

SEQ ID NO: 2144 - RNA, 19 nt, artificial
  Chemically synthesized
cacuucucuugaugcaggc

SEQ ID NO: 2145 - RNA, 19 nt, artificial
  Chemically synthesized
uccucuugauaggguugcc

SEQ ID NO: 2146 - RNA, 19 nt, artificial
  Chemically synthesized
uccuucucacugaccgcuu

SEQ ID NO: 2147 - RNA, 19 nt, artificial
  Chemically synthesized
agugugucaccaaagccac

SEQ ID NO: 2148 - RNA, 19 nt, artificial
  Chemically synthesized
agggaagucaucaagaucu

SEQ ID NO: 2149 - RNA, 19 nt, artificial
  Chemically synthesized
gaccuuggacccacgucuc

SEQ ID NO: 2150 - RNA, 19 nt, artificial
  Chemically synthesized
augauuacagcugauguca

SEQ ID NO: 2151 - RNA, 19 nt, artificial
  Chemically synthesized
aacccagcugggagauccc

SEQ ID NO: 2152 - RNA, 19 nt, artificial
  Chemically synthesized
ugggagaucccuaagugcu

SEQ ID NO: 2153 - RNA, 19 nt, artificial
  Chemically synthesized
gaacuggagaaccaaagac

SEQ ID NO: 2154 - RNA, 19 nt, artificial
  Chemically synthesized
uuucugcucagcacgguua

SEQ ID NO: 2155 - RNA, 19 nt, artificial
  Chemically synthesized
ugugacccaguccauccag

SEQ ID NO: 2156 - RNA, 19 nt, artificial
  Chemically synthesized
ucuuguguguucccagcac

SEQ ID NO: 2157 - RNA, 19 nt, artificial
  Chemically synthesized
ucagagggaggcucccacu

SEQ ID NO: 2158 - RNA, 19 nt, artificial
  Chemically synthesized
aucccuaagugcugccugc

SEQ ID NO: 2159 - RNA, 19 nt, artificial
  Chemically synthesized
uacggcagcaaguccaaua

SEQ ID NO: 2160 - RNA, 19 nt, artificial
  Chemically synthesized
aagggaagucaucaagauc

SEQ ID NO: 2161 - RNA, 19 nt, artificial
  Chemically synthesized
uacuaugcuuagcuggcgu

SEQ ID NO: 2162 - RNA, 19 nt, artificial
  Chemically synthesized
aaacaggccauaguguccu

SEQ ID NO: 2163 - RNA, 19 nt, artificial
  Chemically synthesized
ugguaccugugguucaggc

SEQ ID NO: 2164 - RNA, 19 nt, artificial
  Chemically synthesized
ugaugucaaaaacaaacca

SEQ ID NO: 2165 - RNA, 19 nt, artificial
  Chemically synthesized
uuccucugucagcugccac

SEQ ID NO: 2166 - RNA, 19 nt, artificial
  Chemically synthesized
ggauuaauaggauugaugg

SEQ ID NO: 2167 - RNA, 19 nt, artificial
  Chemically synthesized
aaaacaggccauagugucc

SEQ ID NO: 2168 - RNA, 19 nt, artificial
  Chemically synthesized
uucccagcaccggaagguc

SEQ ID NO: 2169 - RNA, 19 nt, artificial
  Chemically synthesized
uuuucuguccucaggaugu

SEQ ID NO: 2170 - RNA, 19 nt, artificial
  Chemically synthesized
ugcguguguauguuuacau

SEQ ID NO: 2171 - RNA, 19 nt, artificial
  Chemically synthesized
agucgaaacccuuggaggc

SEQ ID NO: 2172 - RNA, 19 nt, artificial
  Chemically synthesized
gucacuucucuugaugcag

SEQ ID NO: 2173 - RNA, 19 nt, artificial
  Chemically synthesized
ucugggucaaaugcuucca

SEQ ID NO: 2174 - RNA, 19 nt, artificial
  Chemically synthesized
ucaacaacucuuguguguu

SEQ ID NO: 2175 - RNA, 19 nt, artificial
  Chemically synthesized
cauagguucccuaguuccc

SEQ ID NO: 2176 - RNA, 19 nt, artificial
  Chemically synthesized
uuacauaaugugccuguau

SEQ ID NO: 2177 - RNA, 19 nt, artificial
  Chemically synthesized
aggaccuuggacccacguc

SEQ ID NO: 2178 - RNA, 19 nt, artificial
  Chemically synthesized
guucuuccuauccuaaccc

SEQ ID NO: 2179 - RNA, 19 nt, artificial
  Chemically synthesized
cauccagaggcacucgucc

SEQ ID NO: 2180 - RNA, 19 nt, artificial
  Chemically synthesized
aaacccuuggaggcuuuuu

SEQ ID NO: 2181 - RNA, 19 nt, artificial
  Chemically synthesized
agaccgaaccuacucaaag

SEQ ID NO: 2182 - RNA, 19 nt, artificial
  Chemically synthesized
gauacccucccagucugcc

SEQ ID NO: 2183 - RNA, 19 nt, artificial
  Chemically synthesized
ugccaaauggagagccuuc

SEQ ID NO: 2184 - RNA, 19 nt, artificial
  Chemically synthesized
acaaggcucagagggaggc

SEQ ID NO: 2185 - RNA, 19 nt, artificial
  Chemically synthesized
ucuucuuaaccuguuuugu

SEQ ID NO: 2186 - RNA, 19 nt, artificial
  Chemically synthesized
cacugagggaacacauagg

SEQ ID NO: 2187 - RNA, 19 nt, artificial
  Chemically synthesized
uauccuucucaggcccuuu

SEQ ID NO: 2188 - RNA, 19 nt, artificial
  Chemically synthesized
agagacaugcgcagucugc

SEQ ID NO: 2189 - RNA, 19 nt, artificial
  Chemically synthesized
aacacuaagccugggaggg

SEQ ID NO: 2190 - RNA, 19 nt, artificial
  Chemically synthesized
cagucgaaacccuuggagg

SEQ ID NO: 2191 - RNA, 19 nt, artificial
  Chemically synthesized
ggcuccuucaagaacuagc

SEQ ID NO: 2192 - RNA, 19 nt, artificial
  Chemically synthesized
agaaagggaagucaucaag

SEQ ID NO: 2193 - RNA, 19 nt, artificial
  Chemically synthesized
uggaauucugaggauuaau

SEQ ID NO: 2194 - RNA, 19 nt, artificial
  Chemically synthesized
gaaaucacauggacugguc

SEQ ID NO: 2195 - RNA, 19 nt, artificial
  Chemically synthesized
aguccacuuccuucucacu

SEQ ID NO: 2196 - RNA, 19 nt, artificial
  Chemically synthesized
gaggaaacaagagauucuc

SEQ ID NO: 2197 - RNA, 19 nt, artificial
  Chemically synthesized
cgaugccaaauggagagcc

SEQ ID NO: 2198 - RNA, 19 nt, artificial
  Chemically synthesized
ugccagaacaggcaagaag

SEQ ID NO: 2199 - RNA, 19 nt, artificial
  Chemically synthesized
guguggaucaaauauaaag

SEQ ID NO: 2200 - RNA, 19 nt, artificial
  Chemically synthesized
aaugcacauuuccaggccc

SEQ ID NO: 2201 - RNA, 19 nt, artificial
  Chemically synthesized
agugagugugucaccaaag

SEQ ID NO: 2202 - RNA, 19 nt, artificial
  Chemically synthesized
uccuucccuuccuaggcug

SEQ ID NO: 2203 - RNA, 19 nt, artificial
  Chemically synthesized
uccuccaacguccagcgag

SEQ ID NO: 2204 - RNA, 19 nt, artificial
  Chemically synthesized
acacaagcccggauaaagc

SEQ ID NO: 2205 - RNA, 19 nt, artificial
  Chemically synthesized
augucguuuccagagucca

SEQ ID NO: 2206 - RNA, 19 nt, artificial
  Chemically synthesized
ucaaaugcuuccacgaugc

SEQ ID NO: 2207 - RNA, 19 nt, artificial
  Chemically synthesized
acaucuuaccaacuuuagg

SEQ ID NO: 2208 - RNA, 19 nt, artificial
  Chemically synthesized
aagcauuuugcaagaccac

SEQ ID NO: 2209 - RNA, 19 nt, artificial
  Chemically synthesized
agcuagggaagggaccuug

SEQ ID NO: 2210 - RNA, 19 nt, artificial
  Chemically synthesized
cucaagaaugauacaaagc

SEQ ID NO: 2211 - RNA, 19 nt, artificial
  Chemically synthesized
cacccaaggaucgaagccc

SEQ ID NO: 2212 - RNA, 19 nt, artificial
  Chemically synthesized
auggacugguccauuauga

SEQ ID NO: 2213 - RNA, 19 nt, artificial
  Chemically synthesized
agagccuucuuaaacuaua

SEQ ID NO: 2214 - RNA, 19 nt, artificial
  Chemically synthesized
uauggguccucgaugucga

SEQ ID NO: 2215 - RNA, 19 nt, artificial
  Chemically synthesized
uggaggcugagaaagaagu

SEQ ID NO: 2216 - RNA, 19 nt, artificial
  Chemically synthesized
ucaccuaucaucugagaau

SEQ ID NO: 2217 - RNA, 19 nt, artificial
  Chemically synthesized
agaguccacuuccuucuca

SEQ ID NO: 2218 - RNA, 19 nt, artificial
  Chemically synthesized
agucuuaacaggugcuuug

SEQ ID NO: 2219 - RNA, 19 nt, artificial
  Chemically synthesized
ucagcugaggcuggaacgc

SEQ ID NO: 2220 - RNA, 19 nt, artificial
  Chemically synthesized
uugcaagaccacgcccagg

SEQ ID NO: 2221 - RNA, 19 nt, artificial
  Chemically synthesized
gauacaaagcaucagagac

SEQ ID NO: 2222 - RNA, 19 nt, artificial
  Chemically synthesized
uaagccugggagggcacag

SEQ ID NO: 2223 - RNA, 19 nt, artificial
  Chemically synthesized
guguuauauggguuggagg

SEQ ID NO: 2224 - RNA, 19 nt, artificial
  Chemically synthesized
ugcucaagaaugauacaaa

SEQ ID NO: 2225 - RNA, 19 nt, artificial
  Chemically synthesized
guggaucaaauauaaaggc

SEQ ID NO: 2226 - RNA, 19 nt, artificial
  Chemically synthesized
aaagggaccugguaggccu

SEQ ID NO: 2227 - RNA, 19 nt, artificial
  Chemically synthesized
agagagcugugcuuagaac

SEQ ID NO: 2228 - RNA, 19 nt, artificial
  Chemically synthesized
aggguaauaaaaaacacag

SEQ ID NO: 2229 - RNA, 19 nt, artificial
  Chemically synthesized
aaaauccuucccuuccuag

SEQ ID NO: 2230 - RNA, 19 nt, artificial
  Chemically synthesized
ugcacucgcagcccaucug

SEQ ID NO: 2231 - RNA, 19 nt, artificial
  Chemically synthesized
uccaggugccugaugccag

SEQ ID NO: 2232 - RNA, 19 nt, artificial
  Chemically synthesized
agaaugauacaaagcauca

SEQ ID NO: 2233 - RNA, 19 nt, artificial
  Chemically synthesized
ucccuuccuaggcuggacu

SEQ ID NO: 2234 - RNA, 19 nt, artificial
  Chemically synthesized
cuuagcuagguaaucuuug

SEQ ID NO: 2235 - RNA, 19 nt, artificial
  Chemically synthesized
ccagaguccacuuccuucu

SEQ ID NO: 2236 - RNA, 19 nt, Artificial Sequence
  Chemically synthesized
aacuuuaggucacuguaca

SEQ ID NO: 2237 - RNA, 19 nt, artificial
  Chemically synthesized
uucgccugcaucaagagaa

SEQ ID NO: 2238 - RNA, 19 nt, artificial
  Chemically synthesized
gugcauuuugcagaaacuu

SEQ ID NO: 2239 - RNA, 19 nt, artificial
  Chemically synthesized
gguaccagaugggcugcga

SEQ ID NO: 2240 - RNA, 19 nt, artificial
  Chemically synthesized
ggucucgcuggacguugga

SEQ ID NO: 2241 - RNA, 19 nt, artificial
  Chemically synthesized
ucgccugcaucaagagaag

SEQ ID NO: 2242 - RNA, 19 nt, artificial
  Chemically synthesized
cuuccuggaaacagcauga

SEQ ID NO: 2243 - RNA, 19 nt, artificial
  Chemically synthesized
gggcaccaggccaaguucu

SEQ ID NO: 2244 - RNA, 19 nt, artificial
  Chemically synthesized
ccagaagaagagccugaac

SEQ ID NO: 2245 - RNA, 19 nt, artificial
  Chemically synthesized
uggacguuggaggaaagaa

SEQ ID NO: 2246 - RNA, 19 nt, artificial
  Chemically synthesized
gggcugcgagugcaagauc

SEQ ID NO: 2247 - RNA, 19 nt, artificial
  Chemically synthesized
ccacccagaagaagagccu

SEQ ID NO: 2248 - RNA, 19 nt, artificial
  Chemically synthesized
augggcugcgagugcaaga

SEQ ID NO: 2249 - RNA, 19 nt, artificial
  Chemically synthesized
auggacugggucacagaga

SEQ ID NO: 2250 - RNA, 19 nt, artificial
  Chemically synthesized
ugggcugcgagugcaagau

SEQ ID NO: 2251 - RNA, 19 nt, artificial
  Chemically synthesized
acguuggaggaaagaagga

SEQ ID NO: 2252 - RNA, 19 nt, artificial
  Chemically synthesized
gacguuggaggaaagaagg

SEQ ID NO: 2253 - RNA, 19 nt, artificial
  Chemically synthesized
aggccaaguucuucgccug

SEQ ID NO: 2254 - RNA, 19 nt, artificial
  Chemically synthesized
gaagaagagccugaaccac

SEQ ID NO: 2255 - RNA, 19 nt, artificial
  Chemically synthesized
gcacccgcaacaggcguuu

SEQ ID NO: 2256 - RNA, 19 nt, artificial
  Chemically synthesized
uucuucgccugcaucaaga

SEQ ID NO: 2257 - RNA, 19 nt, artificial
  Chemically synthesized
gagccugaaccacagguac

SEQ ID NO: 2258 - RNA, 19 nt, artificial
  Chemically synthesized
cuucgccugcaucaagaga

SEQ ID NO: 2259 - RNA, 19 nt, artificial
  Chemically synthesized
uggaaacagcaugaauaaa

SEQ ID NO: 2260 - RNA, 19 nt, artificial
  Chemically synthesized
gacaucccuuccuggaaac

SEQ ID NO: 2261 - RNA, 19 nt, artificial
  Chemically synthesized
guucuucgccugcaucaag

SEQ ID NO: 2262 - RNA, 19 nt, artificial
  Chemically synthesized
aaguucuucgccugcauca

SEQ ID NO: 2263 - RNA, 19 nt, artificial
  Chemically synthesized
cccuuccuggaaacagcau

SEQ ID NO: 2264 - RNA, 19 nt, artificial
  Chemically synthesized
cgcucggccuccugcugcu

SEQ ID NO: 2265 - RNA, 19 nt, artificial
  Chemically synthesized
ugaaccacagguaccagau

SEQ ID NO: 2266 - RNA, 19 nt, artificial
  Chemically synthesized
cugaaccacagguaccaga

SEQ ID NO: 2267 - RNA, 19 nt, artificial
  Chemically synthesized
cagaagaagagccugaacc

SEQ ID NO: 2268 - RNA, 19 nt, artificial
  Chemically synthesized
uccuggaaacagcaugaau

SEQ ID NO: 2269 - RNA, 19 nt, artificial
  Chemically synthesized
gauggacugggucacagag

SEQ ID NO: 2270 - RNA, 19 nt, artificial
  Chemically synthesized
gccgacgccugcagcugcu

SEQ ID NO: 2271 - RNA, 19 nt, artificial
  Chemically synthesized
caggcguuuugcaaugcag

SEQ ID NO: 2272 - RNA, 19 nt, artificial
  Chemically synthesized
ucaagcagauaaagauguu

SEQ ID NO: 2273 - RNA, 19 nt, artificial
  Chemically synthesized
gaaccacagguaccagaug

SEQ ID NO: 2274 - RNA, 19 nt, artificial
  Chemically synthesized
cacccagaagaagagccug

SEQ ID NO: 2275 - RNA, 19 nt, artificial
  Chemically synthesized
ccuuccuggaaacagcaug

SEQ ID NO: 2276 - RNA, 19 nt, artificial
  Chemically synthesized
caacaggcguuuugcaaug

SEQ ID NO: 2277 - RNA, 19 nt, artificial
  Chemically synthesized
cacagguaccagaugggcu

SEQ ID NO: 2278 - RNA, 19 nt, artificial
  Chemically synthesized
ucccuuccuggaaacagca

SEQ ID NO: 2279 - RNA, 19 nt, artificial
  Chemically synthesized
ugagaucaagcagauaaag

SEQ ID NO: 2280 - RNA, 19 nt, artificial
  Chemically synthesized
ggugcacccgcaacaggcg

SEQ ID NO: 2281 - RNA, 19 nt, artificial
  Chemically synthesized
agugccucuggauggacug

SEQ ID NO: 2282 - RNA, 19 nt, artificial
  Chemically synthesized
aagcagauaaagauguuca

SEQ ID NO: 2283 - RNA, 19 nt, artificial
  Chemically synthesized
ugcacccgcaacaggcguu

SEQ ID NO: 2284 - RNA, 19 nt, artificial
  Chemically synthesized
cacccgcaacaggcguuuu

SEQ ID NO: 2285 - RNA, 19 nt, artificial
  Chemically synthesized
cuggacguuggaggaaaga

SEQ ID NO: 2286 - RNA, 19 nt, artificial
  Chemically synthesized
aucccuuccuggaaacagc

SEQ ID NO: 2287 - RNA, 19 nt, artificial
  Chemically synthesized
acaggcguuuugcaaugca

SEQ ID NO: 2288 - RNA, 19 nt, artificial
  Chemically synthesized
gaugggcugcgagugcaag

SEQ ID NO: 2289 - RNA, 19 nt, artificial
  Chemically synthesized
agccugaaccacagguacc

SEQ ID NO: 2290 - RNA, 19 nt, artificial
  Chemically synthesized
ccucuggauggacuggguc

SEQ ID NO: 2291 - RNA, 19 nt, artificial
  Chemically synthesized
cgggcaccaggccaaguuc

SEQ ID NO: 2292 - RNA, 19 nt, artificial
  Chemically synthesized
caggccaaguucuucgccu

SEQ ID NO: 2293 - RNA, 19 nt, artificial
  Chemically synthesized
caaguucuucgccugcauc

SEQ ID NO: 2294 - RNA, 19 nt, artificial
  Chemically synthesized
acuucaucgugcccuggga

SEQ ID NO: 2295 - RNA, 19 nt, artificial
  Chemically synthesized
acaucccuuccuggaaaca

SEQ ID NO: 2296 - RNA, 19 nt, artificial
  Chemically synthesized
uaccagaugggcugcgagu

SEQ ID NO: 2297 - RNA, 19 nt, artificial
  Chemically synthesized
ggccaaguucuucgccugc

SEQ ID NO: 2298 - RNA, 19 nt, artificial
  Chemically synthesized
ccagaugggcugcgagugc

SEQ ID NO: 2299 - RNA, 19 nt, artificial
  Chemically synthesized
gugacuucaucgugcccug

SEQ ID NO: 2300 - RNA, 19 nt, artificial
  Chemically synthesized
ucgcuggacguuggaggaa

SEQ ID NO: 2301 - RNA, 19 nt, artificial
  Chemically synthesized
aucaagcagauaaagaugu

SEQ ID NO: 2302 - RNA, 19 nt, artificial
  Chemically synthesized
guaccagaugggcugcgag

SEQ ID NO: 2303 - RNA, 19 nt, artificial
  Chemically synthesized
cgagugccucuggauggac

SEQ ID NO: 2304 - RNA, 19 nt, artificial
  Chemically synthesized
ucuggauggacugggucac

SEQ ID NO: 2305 - RNA, 19 nt, artificial
  Chemically synthesized
accagaugggcugcgagug

SEQ ID NO: 2306 - RNA, 19 nt, artificial
  Chemically synthesized
acagguaccagaugggcug

SEQ ID NO: 2307 - RNA, 19 nt, artificial
  Chemically synthesized
gaagagccugaaccacagg

SEQ ID NO: 2308 - RNA, 19 nt, artificial
  Chemically synthesized
gugcacccgcaacaggcgu

SEQ ID NO: 2309 - RNA, 19 nt, artificial
  Chemically synthesized
uggauggacugggucacag

SEQ ID NO: 2310 - RNA, 19 nt, artificial
  Chemically synthesized
caagcagauaaagauguuc

SEQ ID NO: 2311 - RNA, 19 nt, artificial
  Chemically synthesized
gugccucuggauggacugg

SEQ ID NO: 2312 - RNA, 19 nt, artificial
  Chemically synthesized
caucccuuccuggaaacag

SEQ ID NO: 2313 - RNA, 19 nt, artificial
  Chemically synthesized
caccaggccaaguucuucg

SEQ ID NO: 2314 - RNA, 19 nt, artificial
  Chemically synthesized
ccugaaccacagguaccag

SEQ ID NO: 2315 - RNA, 19 nt, artificial
  Chemically synthesized
aaccacagguaccagaugg

SEQ ID NO: 2316 - RNA, 19 nt, artificial
  Chemically synthesized
gucucgcuggacguuggag

SEQ ID NO: 2317 - RNA, 19 nt, artificial
  Chemically synthesized
agaguuuaucuacacggcc

SEQ ID NO: 2318 - RNA, 19 nt, artificial
  Chemically synthesized
uuccuggaaacagcaugaa

SEQ ID NO: 2319 - RNA, 19 nt, artificial
  Chemically synthesized
gauaaagauguucaaaggg

SEQ ID NO: 2320 - RNA, 19 nt, artificial
  Chemically synthesized
ucuucgccugcaucaagag

SEQ ID NO: 2321 - RNA, 19 nt, artificial
  Chemically synthesized
uggcgcucggccuccugcu

SEQ ID NO: 2322 - RNA, 19 nt, artificial
  Chemically synthesized
cccggugcacccgcaacag

SEQ ID NO: 2323 - RNA, 19 nt, artificial
  Chemically synthesized
cccgcaacaggcguuuugc

SEQ ID NO: 2324 - RNA, 19 nt, artificial
  Chemically synthesized
cagggccaaagcggucagu

SEQ ID NO: 2325 - RNA, 19 nt, artificial
  Chemically synthesized
aagagccugaaccacaggu

SEQ ID NO: 2326 - RNA, 19 nt, artificial
  Chemically synthesized
accacagguaccagauggg

SEQ ID NO: 2327 - RNA, 19 nt, artificial
  Chemically synthesized
cagguaccagaugggcugc

SEQ ID NO: 2328 - RNA, 19 nt, artificial
  Chemically synthesized
cggugcacccgcaacaggc

SEQ ID NO: 2329 - RNA, 19 nt, artificial
  Chemically synthesized
gcucggccuccugcugcug

SEQ ID NO: 2330 - RNA, 19 nt, artificial
  Chemically synthesized
gacgccugcagcugcuccc

SEQ ID NO: 2331 - RNA, 19 nt, artificial
  Chemically synthesized
acccgcaacaggcguuuug

SEQ ID NO: 2332 - RNA, 19 nt, artificial
  Chemically synthesized
ccggugcacccgcaacagg

SEQ ID NO: 2333 - RNA, 19 nt, artificial
  Chemically synthesized
ucucgcuggacguuggagg

SEQ ID NO: 2334 - RNA, 19 nt, artificial
  Chemically synthesized
aacagcaugaauaaaacac

SEQ ID NO: 2335 - RNA, 19 nt, artificial
  Chemically synthesized
ccacagguaccagaugggc

SEQ ID NO: 2336 - RNA, 19 nt, artificial
  Chemically synthesized
ccgacgccugcagcugcuc

SEQ ID NO: 2337 - RNA, 19 nt, artificial
  Chemically synthesized
uucaucgugcccugggaca

SEQ ID NO: 2338 - RNA, 19 nt, artificial
  Chemically synthesized
cuucaucgugcccugggac

SEQ ID NO: 2339 - RNA, 19 nt, artificial
  Chemically synthesized
cgacgccugcagcugcucc

SEQ ID NO: 2340 - RNA, 19 nt, artificial
  Chemically synthesized
ugccucuggauggacuggg

SEQ ID NO: 2341 - RNA, 19 nt, artificial
  Chemically synthesized
accaggccaaguucuucgc

SEQ ID NO: 2342 - RNA, 19 nt, artificial
  Chemically synthesized
agguaccagaugggcugcg

SEQ ID NO: 2343 - RNA, 19 nt, artificial
  Chemically synthesized
cucggccuccugcugcugg

SEQ ID NO: 2344 - RNA, 19 nt, artificial
  Chemically synthesized
aacaggcguuuugcaaugc

SEQ ID NO: 2345 - RNA, 19 nt, artificial
  Chemically synthesized
ucggccuccugcugcuggc

SEQ ID NO: 2346 - RNA, 19 nt, artificial
  Chemically synthesized
ccaggccaaguucuucgcc

SEQ ID NO: 2347 - RNA, 19 nt, artificial
  Chemically synthesized
ugugacuucaucgugcccu

SEQ ID NO: 2348 - RNA, 19 nt, artificial
  Chemically synthesized
gacuucaucgugcccuggg

SEQ ID NO: 2349 - RNA, 19 nt, artificial
  Chemically synthesized
cugugacuucaucgugccc

SEQ ID NO: 2350 - RNA, 19 nt, artificial
  Chemically synthesized
ugacuucaucgugcccugg

SEQ ID NO: 2351 - RNA, 19 nt, artificial
  Chemically synthesized
gcaggaguuucucgacauc

SEQ ID NO: 2352 - RNA, 19 nt, artificial
  Chemically synthesized
gcaccacccagaagaagag

SEQ ID NO: 2353 - RNA, 19 nt, artificial
  Chemically synthesized
agcucugacaucccuuccu

SEQ ID NO: 2354 - RNA, 19 nt, artificial
  Chemically synthesized
uucucuugaugcaggcgaa

SEQ ID NO: 2355 - RNA, 19 nt, artificial
  Chemically synthesized
aaguuucugcaaaaugcac

SEQ ID NO: 2356 - RNA, 19 nt, artificial
  Chemically synthesized
ucgcagcccaucugguacc

SEQ ID NO: 2357 - RNA, 19 nt, artificial
  Chemically synthesized
uccaacguccagcgagacc

SEQ ID NO: 2358 - RNA, 19 nt, artificial
  Chemically synthesized
cuucucuugaugcaggcga

SEQ ID NO: 2359 - RNA, 19 nt, artificial
  Chemically synthesized
ucaugcuguuuccaggaag

SEQ ID NO: 2360 - RNA, 19 nt, artificial
  Chemically synthesized
agaacuuggccuggugccc

SEQ ID NO: 2361 - RNA, 19 nt, artificial
  Chemically synthesized
guucaggcucuucuucugg

SEQ ID NO: 2362 - RNA, 19 nt, artificial
  Chemically synthesized
uucuuuccuccaacgucca

SEQ ID NO: 2363 - RNA, 19 nt, artificial
  Chemically synthesized
gaucuugcacucgcagccc

SEQ ID NO: 2364 - RNA, 19 nt, artificial
  Chemically synthesized
aggcucuucuucugggugg

SEQ ID NO: 2365 - RNA, 19 nt, artificial
  Chemically synthesized
ucuugcacucgcagcccau

SEQ ID NO: 2366 - RNA, 19 nt, artificial
  Chemically synthesized
ucucugugacccaguccau

SEQ ID NO: 2367 - RNA, 19 nt, artificial
  Chemically synthesized
aucuugcacucgcagccca

SEQ ID NO: 2368 - RNA, 19 nt, artificial
  Chemically synthesized
uccuucuuuccuccaacgu

SEQ ID NO: 2369 - RNA, 19 nt, artificial
  Chemically synthesized
ccuucuuuccuccaacguc

SEQ ID NO: 2370 - RNA, 19 nt, artificial
  Chemically synthesized
caggcgaagaacuuggccu

SEQ ID NO: 2371 - RNA, 19 nt, artificial
  Chemically synthesized
gugguucaggcucuucuuc

SEQ ID NO: 2372 - RNA, 19 nt, artificial
  Chemically synthesized
aaacgccuguugcgggugc

SEQ ID NO: 2373 - RNA, 19 nt, artificial
  Chemically synthesized
ucuugaugcaggcgaagaa

SEQ ID NO: 2374 - RNA, 19 nt, artificial
  Chemically synthesized
guaccugugguucaggcuc

SEQ ID NO: 2375 - RNA, 19 nt, artificial
  Chemically synthesized
ucucuugaugcaggcgaag

SEQ ID NO: 2376 - RNA, 19 nt, artificial
  Chemically synthesized
uuuauucaugcuguuucca

SEQ ID NO: 2377 - RNA, 19 nt, artificial
  Chemically synthesized
guuuccaggaagggauguc

SEQ ID NO: 2378 - RNA, 19 nt, artificial
  Chemically synthesized
cuugaugcaggcgaagaac

SEQ ID NO: 2379 - RNA, 19 nt, artificial
  Chemically synthesized
ugaugcaggcgaagaacuu

SEQ ID NO: 2380 - RNA, 19 nt, artificial
  Chemically synthesized
augcuguuuccaggaaggg

SEQ ID NO: 2381 - RNA, 19 nt, artificial
  Chemically synthesized
agcagcaggaggccgagcg

SEQ ID NO: 2382 - RNA, 19 nt, artificial
  Chemically synthesized
aucugguaccugugguuca

SEQ ID NO: 2383 - RNA, 19 nt, artificial
  Chemically synthesized
ucugguaccugugguucag

SEQ ID NO: 2384 - RNA, 19 nt, artificial
  Chemically synthesized
gguucaggcucuucuucug

SEQ ID NO: 2385 - RNA, 19 nt, artificial
  Chemically synthesized
auucaugcuguuuccagga

SEQ ID NO: 2386 - RNA, 19 nt, artificial
  Chemically synthesized
cucugugacccaguccauc

SEQ ID NO: 2387 - RNA, 19 nt, artificial
  Chemically synthesized
agcagcugcaggcgucggc

SEQ ID NO: 2388 - RNA, 19 nt, artificial
  Chemically synthesized
cugcauugcaaaacgccug

SEQ ID NO: 2389 - RNA, 19 nt, artificial
  Chemically synthesized
aacaucuuuaucugcuuga

SEQ ID NO: 2390 - RNA, 19 nt, artificial
  Chemically synthesized
caucugguaccugugguuc

SEQ ID NO: 2391 - RNA, 19 nt, artificial
  Chemically synthesized
caggcucuucuucugggug

SEQ ID NO: 2392 - RNA, 19 nt, artificial
  Chemically synthesized
caugcuguuuccaggaagg

SEQ ID NO: 2393 - RNA, 19 nt, artificial
  Chemically synthesized
cauugcaaaacgccuguug

SEQ ID NO: 2394 - RNA, 19 nt, artificial
  Chemically synthesized
agcccaucugguaccugug

SEQ ID NO: 2395 - RNA, 19 nt, artificial
  Chemically synthesized
ugcuguuuccaggaaggga

SEQ ID NO: 2396 - RNA, 19 nt, artificial
  Chemically synthesized
cuuuaucugcuugaucuca

SEQ ID NO: 2397 - RNA, 19 nt, artificial
  Chemically synthesized
cgccuguugcgggugcacc

SEQ ID NO: 2398 - RNA, 19 nt, artificial
  Chemically synthesized
caguccauccagaggcacu

SEQ ID NO: 2399 - RNA, 19 nt, artificial
  Chemically synthesized
ugaacaucuuuaucugcuu

SEQ ID NO: 2400 - RNA, 19 nt, artificial
  Chemically synthesized
aacgccuguugcgggugca

SEQ ID NO: 2401 - RNA, 19 nt, artificial
  Chemically synthesized
aaaacgccuguugcgggug

SEQ ID NO: 2402 - RNA, 19 nt, artificial
  Chemically synthesized
ucuuuccuccaacguccag

SEQ ID NO: 2403 - RNA, 19 nt, artificial
  Chemically synthesized
gcuguuuccaggaagggau

SEQ ID NO: 2404 - RNA, 19 nt, artificial
  Chemically synthesized
ugcauugcaaaacgccugu

SEQ ID NO: 2405 - RNA, 19 nt, artificial
  Chemically synthesized
cuugcacucgcagcccauc

SEQ ID NO: 2406 - RNA, 19 nt, artificial
  Chemically synthesized
gguaccugugguucaggcu

SEQ ID NO: 2407 - RNA, 19 nt, artificial
  Chemically synthesized
gacccaguccauccagagg

SEQ ID NO: 2408 - RNA, 19 nt, artificial
  Chemically synthesized
gaacuuggccuggugcccg

SEQ ID NO: 2409 - RNA, 19 nt, artificial
  Chemically synthesized
aggcgaagaacuuggccug

SEQ ID NO: 2410 - RNA, 19 nt, artificial
  Chemically synthesized
gaugcaggcgaagaacuug

SEQ ID NO: 2411 - RNA, 19 nt, artificial
  Chemically synthesized
ucccagggcacgaugaagu

SEQ ID NO: 2412 - RNA, 19 nt, artificial
  Chemically synthesized
uguuuccaggaagggaugu

SEQ ID NO: 2413 - RNA, 19 nt, artificial
  Chemically synthesized
acucgcagcccaucuggua

SEQ ID NO: 2414 - RNA, 19 nt, artificial
  Chemically synthesized
gcaggcgaagaacuuggcc

SEQ ID NO: 2415 - RNA, 19 nt, artificial
  Chemically synthesized
gcacucgcagcccaucugg

SEQ ID NO: 2416 - RNA, 19 nt, artificial
  Chemically synthesized
cagggcacgaugaagucac

SEQ ID NO: 2417 - RNA, 19 nt, artificial
  Chemically synthesized
uuccuccaacguccagcga

SEQ ID NO: 2418 - RNA, 19 nt, artificial
  Chemically synthesized
acaucuuuaucugcuugau

SEQ ID NO: 2419 - RNA, 19 nt, artificial
  Chemically synthesized
cucgcagcccaucugguac

SEQ ID NO: 2420 - RNA, 19 nt, artificial
  Chemically synthesized
guccauccagaggcacucg

SEQ ID NO: 2421 - RNA, 19 nt, artificial
  Chemically synthesized
gugacccaguccauccaga

SEQ ID NO: 2422 - RNA, 19 nt, artificial
  Chemically synthesized
cacucgcagcccaucuggu

SEQ ID NO: 2423 - RNA, 19 nt, artificial
  Chemically synthesized
cagcccaucugguaccugu

SEQ ID NO: 2424 - RNA, 19 nt, artificial
  Chemically synthesized
ccugugguucaggcucuuc

SEQ ID NO: 2425 - RNA, 19 nt, artificial
  Chemically synthesized
acgccuguugcgggugcac

SEQ ID NO: 2426 - RNA, 19 nt, artificial
  Chemically synthesized
cugugacccaguccaucca

SEQ ID NO: 2427 - RNA, 19 nt, artificial
  Chemically synthesized
gaacaucuuuaucugcuug

SEQ ID NO: 2428 - RNA, 19 nt, artificial
  Chemically synthesized
ccaguccauccagaggcac

SEQ ID NO: 2429 - RNA, 19 nt, artificial
  Chemically synthesized
cuguuuccaggaagggaug

SEQ ID NO: 2430 - RNA, 19 nt, artificial
  Chemically synthesized
cgaagaacuuggccuggug

SEQ ID NO: 2431 - RNA, 19 nt, artificial
  Chemically synthesized
cugguaccugugguucagg

SEQ ID NO: 2432 - RNA, 19 nt, artificial
  Chemically synthesized
ccaucugguaccugugguu

SEQ ID NO: 2433 - RNA, 19 nt, artificial
  Chemically synthesized
cuccaacguccagcgagac

SEQ ID NO: 2434 - RNA, 19 nt, artificial
  Chemically synthesized
ggccguguagauaaacucu

SEQ ID NO: 2435 - RNA, 19 nt, artificial
  Chemically synthesized
uucaugcuguuuccaggaa

SEQ ID NO: 2436 - RNA, 19 nt, artificial
  Chemically synthesized
cccuuugaacaucuuuauc

SEQ ID NO: 2437 - RNA, 19 nt, artificial
  Chemically synthesized
cucuugaugcaggcgaaga

SEQ ID NO: 2438 - RNA, 19 nt, artificial
  Chemically synthesized
agcaggaggccgagcgcca

SEQ ID NO: 2439 - RNA, 19 nt, artificial
  Chemically synthesized
cuguugcgggugcaccggg

SEQ ID NO: 2440 - RNA, 19 nt, artificial
  Chemically synthesized
gcaaaacgccuguugcggg

SEQ ID NO: 2441 - RNA, 19 nt, artificial
  Chemically synthesized
acugaccgcuuuggcccug

SEQ ID NO: 2442 - RNA, 19 nt, artificial
  Chemically synthesized
accugugguucaggcucuu

SEQ ID NO: 2443 - RNA, 19 nt, artificial
  Chemically synthesized
cccaucugguaccuguggu

SEQ ID NO: 2444 - RNA, 19 nt, artificial
  Chemically synthesized
gcagcccaucugguaccug

SEQ ID NO: 2445 - RNA, 19 nt, artificial
  Chemically synthesized
gccuguugcgggugcaccg

SEQ ID NO: 2446 - RNA, 19 nt, artificial
  Chemically synthesized
cagcagcaggaggccgagc

SEQ ID NO: 2447 - RNA, 19 nt, artificial
  Chemically synthesized
gggagcagcugcaggcguc

SEQ ID NO: 2448 - RNA, 19 nt, artificial
  Chemically synthesized
caaaacgccuguugcgggu

SEQ ID NO: 2449 - RNA, 19 nt, artificial
  Chemically synthesized
ccuguugcgggugcaccgg

SEQ ID NO: 2450 - RNA, 19 nt, artificial
  Chemically synthesized
ccuccaacguccagcgaga

SEQ ID NO: 2451 - RNA, 19 nt, artificial
  Chemically synthesized
guguuuuauucaugcuguu

SEQ ID NO: 2452 - RNA, 19 nt, artificial
  Chemically synthesized
gcccaucugguaccugugg

SEQ ID NO: 2453 - RNA, 19 nt, artificial
  Chemically synthesized
gagcagcugcaggcgucgg

SEQ ID NO: 2454 - RNA, 19 nt, artificial
  Chemically synthesized
ugucccagggcacgaugaa

SEQ ID NO: 2455 - RNA, 19 nt, artificial
  Chemically synthesized
gucccagggcacgaugaag

SEQ ID NO: 2456 - RNA, 19 nt, artificial
  Chemically synthesized
ggagcagcugcaggcgucg

SEQ ID NO: 2457 - RNA, 19 nt, artificial
  Chemically synthesized
cccaguccauccagaggca

SEQ ID NO: 2458 - RNA, 19 nt, artificial
  Chemically synthesized
gcgaagaacuuggccuggu

SEQ ID NO: 2459 - RNA, 19 nt, artificial
  Chemically synthesized
cgcagcccaucugguaccu

SEQ ID NO: 2460 - RNA, 19 nt, artificial
  Chemically synthesized
ccagcagcaggaggccgag

SEQ ID NO: 2461 - RNA, 19 nt, artificial
  Chemically synthesized
gcauugcaaaacgccuguu

SEQ ID NO: 2462 - RNA, 19 nt, artificial
  Chemically synthesized
gccagcagcaggaggccga

SEQ ID NO: 2463 - RNA, 19 nt, artificial
  Chemically synthesized
ggcgaagaacuuggccugg

SEQ ID NO: 2464 - RNA, 19 nt, artificial
  Chemically synthesized
agggcacgaugaagucaca

SEQ ID NO: 2465 - RNA, 19 nt, artificial
  Chemically synthesized
cccagggcacgaugaaguc

SEQ ID NO: 2466 - RNA, 19 nt, artificial
  Chemically synthesized
gggcacgaugaagucacag

SEQ ID NO: 2467 - RNA, 19 nt, artificial
  Chemically synthesized
ccagggcacgaugaaguca

SEQ ID NO: 2468 - RNA, 19 nt, artificial
  Chemically synthesized
gaugucgagaaacuccugc

SEQ ID NO: 2469 - RNA, 19 nt, artificial
  Chemically synthesized
cucuucuucuggguggugc

SEQ ID NO: 2470 - RNA, 19 nt, Artificial Sequence
  Chemically synthesized
aggaagggaugucagagcu

SEQ ID NO: 2471 - RNA, 19 nt, artificial
  Chemically synthesized
ggcugcgagugcaagauca

SEQ ID NO: 2472 - RNA, 19 nt, artificial
  Chemically synthesized
guaugagaucaagcagaua

SEQ ID NO: 2473 - RNA, 19 nt, artificial
  Chemically synthesized
gaggaaagaaggaauaucu

SEQ ID NO: 2474 - RNA, 19 nt, artificial
  Chemically synthesized
ccugcaucaagagaaguga

SEQ ID NO: 2475 - RNA, 19 nt, artificial
  Chemically synthesized
augagaucaagcagauaaa

SEQ ID NO: 2476 - RNA, 19 nt, artificial
  Chemically synthesized
guuggaggaaagaaggaau

SEQ ID NO: 2477 - RNA, 19 nt, artificial
  Chemically synthesized
acugggucacagagaagaa

SEQ ID NO: 2478 - RNA, 19 nt, artificial
  Chemically synthesized
cucuggauggacuggguca

SEQ ID NO: 2479 - RNA, 19 nt, artificial
  Chemically synthesized
ggcguuuugcaaugcagau

SEQ ID NO: 2480 - RNA, 19 nt, artificial
  Chemically synthesized
gccucuggauggacugggu

SEQ ID NO: 2481 - RNA, 19 nt, artificial
  Chemically synthesized
ggaggaaagaaggaauauc

SEQ ID NO: 2482 - RNA, 19 nt, artificial
  Chemically synthesized
ggacugggucacagagaag

SEQ ID NO: 2483 - RNA, 19 nt, artificial
  Chemically synthesized
ggacguuggaggaaagaag

SEQ ID NO: 2484 - RNA, 19 nt, artificial
  Chemically synthesized
cguuggaggaaagaaggaa

SEQ ID NO: 2485 - RNA, 19 nt, artificial
  Chemically synthesized
cugacaucccuuccuggaa

SEQ ID NO: 2486 - RNA, 19 nt, artificial
  Chemically synthesized
ugacaucccuuccuggaaa

SEQ ID NO: 2487 - RNA, 19 nt, artificial
  Chemically synthesized
agaugggcugcgagugcaa

SEQ ID NO: 2488 - RNA, 19 nt, artificial
  Chemically synthesized
gggucucgcuggacguugg

SEQ ID NO: 2489 - RNA, 19 nt, artificial
  Chemically synthesized
gagugccucuggauggacu

SEQ ID NO: 2490 - RNA, 19 nt, artificial
  Chemically synthesized
agcagauaaagauguucaa

SEQ ID NO: 2491 - RNA, 19 nt, artificial
  Chemically synthesized
gcaacaggcguuuugcaau

SEQ ID NO: 2492 - RNA, 19 nt, artificial
  Chemically synthesized
gcuggacguuggaggaaag

SEQ ID NO: 2493 - RNA, 19 nt, artificial
  Chemically synthesized
ugugcauuuugcagaaacu

SEQ ID NO: 2494 - RNA, 19 nt, artificial
  Chemically synthesized
ggcaccaggccaaguucuu

SEQ ID NO: 2495 - RNA, 19 nt, artificial
  Chemically synthesized
gccugcaucaagagaagug

SEQ ID NO: 2496 - RNA, 19 nt, artificial
  Chemically synthesized
cuggauggacugggucaca

SEQ ID NO: 2497 - RNA, 19 nt, artificial
  Chemically synthesized
cugcaucaagagaagugac

SEQ ID NO: 2498 - RNA, 19 nt, artificial
  Chemically synthesized
cucgcuggacguuggagga

SEQ ID NO: 2499 - RNA, 19 nt, artificial
  Chemically synthesized
cagaugggcugcgagugca

SEQ ID NO: 2500 - RNA, 19 nt, artificial
  Chemically synthesized
gugcauuuugcagaaacuu

SEQ ID NO: 2501 - RNA, 19 nt, artificial
  Chemically synthesized
gguaccagaugggcugcga

SEQ ID NO: 2502 - RNA, 19 nt, artificial
  Chemically synthesized
ggucucgcuggacguugga

SEQ ID NO: 2503 - RNA, 19 nt, artificial
  Chemically synthesized
cuuccuggaaacagcauga

SEQ ID NO: 2504 - RNA, 19 nt, artificial
  Chemically synthesized
gggcaccaggccaaguucu

SEQ ID NO: 2505 - RNA, 19 nt, artificial
  Chemically synthesized
gucacagagaagaacauca

SEQ ID NO: 2506 - RNA, 19 nt, artificial
  Chemically synthesized
aggaguuucucgacaucga

SEQ ID NO: 2507 - RNA, 19 nt, artificial
  Chemically synthesized
cccagaagaagagccugaa

SEQ ID NO: 2508 - RNA, 19 nt, artificial
  Chemically synthesized
gggucacagagaagaacau

SEQ ID NO: 2509 - RNA, 19 nt, artificial
  Chemically synthesized
ccaaguucuucgccugcau

SEQ ID NO: 2510 - RNA, 19 nt, artificial
  Chemically synthesized
agcaccacccagaagaaga

SEQ ID NO: 2511 - RNA, 19 nt, artificial
  Chemically synthesized
guuuugcaaugcagaugua

SEQ ID NO: 2512 - RNA, 19 nt, artificial
  Chemically synthesized
agcaggaguuucucgacau

SEQ ID NO: 2513 - RNA, 19 nt, artificial
  Chemically synthesized
ggaguuucucgacaucgag

SEQ ID NO: 2514 - RNA, 19 nt, artificial
  Chemically synthesized
gccugaaccacagguacca

SEQ ID NO: 2515 - RNA, 19 nt, artificial
  Chemically synthesized
uucgccugcaucaagagaa

SEQ ID NO: 2516 - RNA, 19 nt, artificial
  Chemically synthesized
agagccugaaccacaggua

SEQ ID NO: 2517 - RNA, 19 nt, artificial
  Chemically synthesized
gcaggaguuucucgacauc

SEQ ID NO: 2518 - RNA, 19 nt, artificial
  Chemically synthesized
gcaccacccagaagaagag

SEQ ID NO: 2519 - RNA, 19 nt, artificial
  Chemically synthesized
ggacgagugccucuggaug

SEQ ID NO: 2520 - RNA, 19 nt, artificial
  Chemically synthesized
gacugguccagcucugaca

SEQ ID NO: 2521 - RNA, 19 nt, artificial
  Chemically synthesized
acaucacccucugugacuu

SEQ ID NO: 2522 - RNA, 19 nt, artificial
  Chemically synthesized
ccggacgagugccucugga

SEQ ID NO: 2523 - RNA, 19 nt, artificial
  Chemically synthesized
ucgccugcaucaagagaag

SEQ ID NO: 2524 - RNA, 19 nt, artificial
  Chemically synthesized
ugaucuugcacucgcagcc

SEQ ID NO: 2525 - RNA, 19 nt, artificial
  Chemically synthesized
uaucugcuugaucucauac

SEQ ID NO: 2526 - RNA, 19 nt, artificial
  Chemically synthesized
agauauuccuucuuuccuc

SEQ ID NO: 2527 - RNA, 19 nt, artificial
  Chemically synthesized
ucacuucucuugaugcagg

SEQ ID NO: 2528 - RNA, 19 nt, artificial
  Chemically synthesized
uuuaucugcuugaucucau

SEQ ID NO: 2529 - RNA, 19 nt, artificial
  Chemically synthesized
auuccuucuuuccuccaac

SEQ ID NO: 2530 - RNA, 19 nt, artificial
  Chemically synthesized
uucuucucugugacccagu

SEQ ID NO: 2531 - RNA, 19 nt, artificial
  Chemically synthesized
ugacccaguccauccagag

SEQ ID NO: 2532 - RNA, 19 nt, artificial
  Chemically synthesized
aucugcauugcaaaacgcc

SEQ ID NO: 2533 - RNA, 19 nt, artificial
  Chemically synthesized
acccaguccauccagaggc

SEQ ID NO: 2534 - RNA, 19 nt, artificial
  Chemically synthesized
gauauuccuucuuuccucc

SEQ ID NO: 2535 - RNA, 19 nt, artificial
  Chemically synthesized
cuucucugugacccagucc

SEQ ID NO: 2536 - RNA, 19 nt, artificial
  Chemically synthesized
cuucuuuccuccaacgucc

SEQ ID NO: 2537 - RNA, 19 nt, artificial
  Chemically synthesized
uuccuucuuuccuccaacg

SEQ ID NO: 2538 - RNA, 19 nt, artificial
  Chemically synthesized
uuccaggaagggaugucag

SEQ ID NO: 2539 - RNA, 19 nt, artificial
  Chemically synthesized
uuuccaggaagggauguca

SEQ ID NO: 2540 - RNA, 19 nt, artificial
  Chemically synthesized
uugcacucgcagcccaucu

SEQ ID NO: 2541 - RNA, 19 nt, artificial
  Chemically synthesized
ccaacguccagcgagaccc

SEQ ID NO: 2542 - RNA, 19 nt, artificial
  Chemically synthesized
aguccauccagaggcacuc

SEQ ID NO: 2543 - RNA, 19 nt, artificial
  Chemically synthesized
uugaacaucuuuaucugcu

SEQ ID NO: 2544 - RNA, 19 nt, artificial
  Chemically synthesized
auugcaaaacgccuguugc

SEQ ID NO: 2545 - RNA, 19 nt, artificial
  Chemically synthesized
cuuuccuccaacguccagc

SEQ ID NO: 2546 - RNA, 19 nt, artificial
  Chemically synthesized
aguuucugcaaaaugcaca

SEQ ID NO: 2547 - RNA, 19 nt, artificial
  Chemically synthesized
aagaacuuggccuggugcc

SEQ ID NO: 2548 - RNA, 19 nt, artificial
  Chemically synthesized
cacuucucuugaugcaggc

SEQ ID NO: 2549 - RNA, 19 nt, artificial
  Chemically synthesized
ugugacccaguccauccag

SEQ ID NO: 2550 - RNA, 19 nt, artificial
  Chemically synthesized
gucacuucucuugaugcag

SEQ ID NO: 2551 - RNA, 19 nt, artificial
  Chemically synthesized
uccuccaacguccagcgag

SEQ ID NO: 2552 - RNA, 19 nt, artificial
  Chemically synthesized
ugcacucgcagcccaucug

SEQ ID NO: 2553 - RNA, 19 nt, artificial
  Chemically synthesized
aaguuucugcaaaaugcac

SEQ ID NO: 2554 - RNA, 19 nt, artificial
  Chemically synthesized
ucgcagcccaucugguacc

SEQ ID NO: 2555 - RNA, 19 nt, artificial
  Chemically synthesized
uccaacguccagcgagacc

SEQ ID NO: 2556 - RNA, 19 nt, artificial
  Chemically synthesized
ucaugcuguuuccaggaag

SEQ ID NO: 2557 - RNA, 19 nt, artificial
  Chemically synthesized
agaacuuggccuggugccc

SEQ ID NO: 2558 - RNA, 19 nt, artificial
  Chemically synthesized
ugauguucuucucugugac

SEQ ID NO: 2559 - RNA, 19 nt, artificial
  Chemically synthesized
ucgaugucgagaaacuccu

SEQ ID NO: 2560 - RNA, 19 nt, artificial
  Chemically synthesized
uucaggcucuucuucuggg

SEQ ID NO: 2561 - RNA, 19 nt, artificial
  Chemically synthesized
auguucuucucugugaccc

SEQ ID NO: 2562 - RNA, 19 nt, artificial
  Chemically synthesized
augcaggcgaagaacuugg

SEQ ID NO: 2563 - RNA, 19 nt, artificial
  Chemically synthesized
ucuucuucuggguggugcu

SEQ ID NO: 2564 - RNA, 19 nt, artificial
  Chemically synthesized
uacaucugcauugcaaaac

SEQ ID NO: 2565 - RNA, 19 nt, artificial
  Chemically synthesized
augucgagaaacuccugcu

SEQ ID NO: 2566 - RNA, 19 nt, artificial
  Chemically synthesized
cucgaugucgagaaacucc

SEQ ID NO: 2567 - RNA, 19 nt, artificial
  Chemically synthesized
ugguaccugugguucaggc

SEQ ID NO: 2568 - RNA, 19 nt, artificial
  Chemically synthesized
uucucuugaugcaggcgaa

SEQ ID NO: 2569 - RNA, 19 nt, artificial
  Chemically synthesized
uaccugugguucaggcucu

SEQ ID NO: 2570 - RNA, 19 nt, artificial
  Chemically synthesized
gaugucgagaaacuccugc

SEQ ID NO: 2571 - RNA, 19 nt, artificial
  Chemically synthesized
cucuucuucuggguggugc

SEQ ID NO: 2572 - RNA, 19 nt, artificial
  Chemically synthesized
cauccagaggcacucgucc

SEQ ID NO: 2573 - RNA, 19 nt, artificial
  Chemically synthesized
ugucagagcuggaccaguc

SEQ ID NO: 2574 - RNA, 19 nt, artificial
  Chemically synthesized
aagucacagagggugaugu

SEQ ID NO: 2575 - RNA, 19 nt, artificial
  Chemically synthesized
uccagaggcacucguccgg

SEQ ID NO: 2576 - RNA, 19 nt, Artificial Sequence
  Chemically synthesized
cuucucuugaugcaggcga

SEQ ID NO: 2577 - RNA, 18 nt, artificial
  Chemically synthesized
ccaugugauuucaguaua

SEQ ID NO: 2578 - RNA, 18 nt, artificial
  Chemically synthesized
cucugagccuuguagaaa

SEQ ID NO: 2579 - RNA, 18 nt, artificial
  Chemically synthesized
gguaaugauaaggagaau

SEQ ID NO: 2580 - RNA, 18 nt, artificial
  Chemically synthesized
gaugcuuuguaucauucu

SEQ ID NO: 2581 - RNA, 18 nt, artificial
  Chemically synthesized
gggucuggagggagacgu

SEQ ID NO: 2582 - RNA, 18 nt, artificial
  Chemically synthesized
gauccaguaugagaucaa

SEQ ID NO: 2583 - RNA, 18 nt, artificial
  Chemically synthesized
cugagaaggauauagagu

SEQ ID NO: 2584 - RNA, 18 nt, artificial
  Chemically synthesized
guaucauucuugagcaau

SEQ ID NO: 2585 - RNA, 18 nt, artificial
  Chemically synthesized
gccugagaaggauauaga

SEQ ID NO: 2586 - RNA, 18 nt, artificial
  Chemically synthesized
ggcuaguucuugaaggag

SEQ ID NO: 2587 - RNA, 18 nt, artificial
  Chemically synthesized
gggucacagagaagaaca

SEQ ID NO: 2588 - RNA, 18 nt, artificial
  Chemically synthesized
ggaucuuugaguagguuc

SEQ ID NO: 2589 - RNA, 18 nt, artificial
  Chemically synthesized
ggaaguggacucuggaaa

SEQ ID NO: 2590 - RNA, 18 nt, artificial
  Chemically synthesized
gaaccugaguugcagaua

SEQ ID NO: 2591 - RNA, 18 nt, artificial
  Chemically synthesized
gguccaagguccucaucc

SEQ ID NO: 2592 - RNA, 18 nt, artificial
  Chemically synthesized
guauuagacuugcacuuu

SEQ ID NO: 2593 - RNA, 18 nt, artificial
  Chemically synthesized
ccugcaagcaacucaaaa

SEQ ID NO: 2594 - RNA, 18 nt, artificial
  Chemically synthesized
ggaggaaagaaggaauau

SEQ ID NO: 2595 - RNA, 18 nt, artificial
  Chemically synthesized
ggaauaugaagucugaga

SEQ ID NO: 2596 - RNA, 18 nt, artificial
  Chemically synthesized
ggacguuggaggaaagaa

SEQ ID NO: 2597 - RNA, 18 nt, artificial
  Chemically synthesized
cagugagaaggaagugga

SEQ ID NO: 2598 - RNA, 18 nt, artificial
  Chemically synthesized
agaggauccaguaugaga

SEQ ID NO: 2599 - RNA, 18 nt, artificial
  Chemically synthesized
ggucagugagaaggaagu

SEQ ID NO: 2600 - RNA, 18 nt, artificial
  Chemically synthesized
cuugguagguauuagacu

SEQ ID NO: 2601 - RNA, 18 nt, artificial
  Chemically synthesized
gggcagacugggagggua

SEQ ID NO: 2602 - RNA, 18 nt, artificial
  Chemically synthesized
ccaguaugagaucaagca

SEQ ID NO: 2603 - RNA, 18 nt, artificial
  Chemically synthesized
gggucucgcuggacguug

SEQ ID NO: 2604 - RNA, 18 nt, artificial
  Chemically synthesized
gcagauauaccaacuucu

SEQ ID NO: 2605 - RNA, 18 nt, artificial
  Chemically synthesized
agacguggguccaagguc

SEQ ID NO: 2606 - RNA, 18 nt, artificial
  Chemically synthesized
cacagaucuugaugacuu

SEQ ID NO: 2607 - RNA, 18 nt, artificial
  Chemically synthesized
ggauugaguugcacagcu

SEQ ID NO: 2608 - RNA, 18 nt, artificial
  Chemically synthesized
ggguccaaauuaauauga

SEQ ID NO: 2609 - RNA, 18 nt, artificial
  Chemically synthesized
gugagaaggaaguggacu

SEQ ID NO: 2610 - RNA, 18 nt, artificial
  Chemically synthesized
accuuagccuguucuauu

SEQ ID NO: 2611 - RNA, 18 nt, artificial
  Chemically synthesized
ggugcugggaacacacaa

SEQ ID NO: 2612 - RNA, 18 nt, artificial
  Chemically synthesized
gcaugucucugaugcuuu

SEQ ID NO: 2613 - RNA, 18 nt, artificial
  Chemically synthesized
gcaagcaacucaaaauau

SEQ ID NO: 2614 - RNA, 18 nt, artificial
  Chemically synthesized
ggcguggucuugcaaaau

SEQ ID NO: 2615 - RNA, 18 nt, artificial
  Chemically synthesized
cgucuuugguucuccagu

SEQ ID NO: 2616 - RNA, 18 nt, artificial
  Chemically synthesized
guucuccaguucaaauua

SEQ ID NO: 2617 - RNA, 18 nt, artificial
  Chemically synthesized
aguaugagaucaagcaga

SEQ ID NO: 2618 - RNA, 18 nt, artificial
  Chemically synthesized
gccuguuuuaagagacau

SEQ ID NO: 2619 - RNA, 18 nt, artificial
  Chemically synthesized
gggccugagaaggauaua

SEQ ID NO: 2620 - RNA, 18 nt, artificial
  Chemically synthesized
gccuggaaccaguggcua

SEQ ID NO: 2621 - RNA, 18 nt, artificial
  Chemically synthesized
ccaacuucugcuuguauu

SEQ ID NO: 2622 - RNA, 18 nt, artificial
  Chemically synthesized
cgauauacaggcacauua

SEQ ID NO: 2623 - RNA, 18 nt, artificial
  Chemically synthesized
ggccuaugcagguggauu

SEQ ID NO: 2624 - RNA, 18 nt, artificial
  Chemically synthesized
gggaggguauccaggaau

SEQ ID NO: 2625 - RNA, 18 nt, artificial
  Chemically synthesized
ccuauuaauccucagaau

SEQ ID NO: 2626 - RNA, 18 nt, artificial
  Chemically synthesized
gggagacguggguccaag

SEQ ID NO: 2627 - RNA, 18 nt, artificial
  Chemically synthesized
gcucaaauaccuucacaa

SEQ ID NO: 2628 - RNA, 18 nt, artificial
  Chemically synthesized
ccaagguccucaucccau

SEQ ID NO: 2629 - RNA, 18 nt, artificial
  Chemically synthesized
aguaagaaguccagccua

SEQ ID NO: 2630 - RNA, 18 nt, artificial
  Chemically synthesized
ggacugggucacagagaa

SEQ ID NO: 2631 - RNA, 18 nt, artificial
  Chemically synthesized
agcuaagcauaguaagaa

SEQ ID NO: 2632 - RNA, 18 nt, artificial
  Chemically synthesized
gguuuguuuuugacauca

SEQ ID NO: 2633 - RNA, 18 nt, artificial
  Chemically synthesized
ggaguuucucgacaucga

SEQ ID NO: 2634 - RNA, 18 nt, artificial
  Chemically synthesized
gagucuuuuuggucugca

SEQ ID NO: 2635 - RNA, 18 nt, artificial
  Chemically synthesized
aggagaaucucuuguuuc

SEQ ID NO: 2636 - RNA, 18 nt, artificial
  Chemically synthesized
cgguaaugauaaggagaa

SEQ ID NO: 2637 - RNA, 18 nt, artificial
  Chemically synthesized
gguauuagacuugcacuu

SEQ ID NO: 2638 - RNA, 18 nt, artificial
  Chemically synthesized
cggucagugagaaggaag

SEQ ID NO: 2639 - RNA, 18 nt, artificial
  Chemically synthesized
gcggucagugagaaggaa

SEQ ID NO: 2640 - RNA, 18 nt, artificial
  Chemically synthesized
uccugaagccagugauau

SEQ ID NO: 2641 - RNA, 18 nt, artificial
  Chemically synthesized
agaagagccugaaccaca

SEQ ID NO: 2642 - RNA, 18 nt, artificial
  Chemically synthesized
gaaagaaggaauaucuca

SEQ ID NO: 2643 - RNA, 18 nt, artificial
  Chemically synthesized
gccguaauuuaaagcucu

SEQ ID NO: 2644 - RNA, 18 nt, artificial
  Chemically synthesized
cguggacaauaaacagua

SEQ ID NO: 2645 - RNA, 18 nt, artificial
  Chemically synthesized
gugaauucucagaugaua

SEQ ID NO: 2646 - RNA, 18 nt, artificial
  Chemically synthesized
ggaacacacaagaguugu

SEQ ID NO: 2647 - RNA, 18 nt, artificial
  Chemically synthesized
gaggauccaguaugagau

SEQ ID NO: 2648 - RNA, 18 nt, artificial
  Chemically synthesized
ugagaaggauauagaguu

SEQ ID NO: 2649 - RNA, 18 nt, artificial
  Chemically synthesized
gcguggucuugcaaaaug

SEQ ID NO: 2650 - RNA, 18 nt, artificial
  Chemically synthesized
cuguuuuaagagacaucu

SEQ ID NO: 2651 - RNA, 18 nt, artificial
  Chemically synthesized
cccucagugugguuuccu

SEQ ID NO: 2652 - RNA, 18 nt, artificial
  Chemically synthesized
gaguugcagauauaccaa

SEQ ID NO: 2653 - RNA, 18 nt, artificial
  Chemically synthesized
cugggaacacacaagagu

SEQ ID NO: 2654 - RNA, 18 nt, artificial
  Chemically synthesized
gcugagucuuuuuggucu

SEQ ID NO: 2655 - RNA, 18 nt, artificial
  Chemically synthesized
cugcaucaagagaaguga

SEQ ID NO: 2656 - RNA, 18 nt, artificial
  Chemically synthesized
gaggaaagaaggaauauc

SEQ ID NO: 2657 - RNA, 18 nt, artificial
  Chemically synthesized
gcuggacguuggaggaaa

SEQ ID NO: 2658 - RNA, 18 nt, artificial
  Chemically synthesized
gguguggccuuuauauuu

SEQ ID NO: 2659 - RNA, 18 nt, artificial
  Chemically synthesized
gcauuuugcagaaacuuu

SEQ ID NO: 2660 - RNA, 18 nt, artificial
  Chemically synthesized
ggaccaguccaugugauu

SEQ ID NO: 2661 - RNA, 18 nt, artificial
  Chemically synthesized
caccuuagccuguucuau

SEQ ID NO: 2662 - RNA, 18 nt, artificial
  Chemically synthesized
ugauaaggagaaucucuu

SEQ ID NO: 2663 - RNA, 18 nt, artificial
  Chemically synthesized
cucaaagacugacagcca

SEQ ID NO: 2664 - RNA, 18 nt, artificial
  Chemically synthesized
gggacauggcccuuguuu

SEQ ID NO: 2665 - RNA, 18 nt, artificial
  Chemically synthesized
ccaucaauccuauuaauc

SEQ ID NO: 2666 - RNA, 18 nt, artificial
  Chemically synthesized
gaaccaguggcuaguucu

SEQ ID NO: 2667 - RNA, 18 nt, artificial
  Chemically synthesized
agacaugguugugggucu

SEQ ID NO: 2668 - RNA, 18 nt, artificial
  Chemically synthesized
guuuaagaaggcucucca

SEQ ID NO: 2669 - RNA, 18 nt, artificial
  Chemically synthesized
cuuccuguauggugauau

SEQ ID NO: 2670 - RNA, 18 nt, artificial
  Chemically synthesized
ggaccuggucagcacaga

SEQ ID NO: 2671 - RNA, 18 nt, artificial
  Chemically synthesized
gagacguggguccaaggu

SEQ ID NO: 2672 - RNA, 18 nt, artificial
  Chemically synthesized
ggaaccaguggcuaguuc

SEQ ID NO: 2673 - RNA, 18 nt, artificial
  Chemically synthesized
gggcagccuggaaccagu

SEQ ID NO: 2674 - RNA, 18 nt, artificial
  Chemically synthesized
gcaucaggcaccuggauu

SEQ ID NO: 2675 - RNA, 18 nt, artificial
  Chemically synthesized
ggcguuuugcaaugcaga

SEQ ID NO: 2676 - RNA, 18 nt, artificial
  Chemically synthesized
ccuccaacccauauaaca

SEQ ID NO: 2677 - RNA, 18 nt, artificial
  Chemically synthesized
gccuuuauauuugaucca

SEQ ID NO: 2678 - RNA, 18 nt, artificial
  Chemically synthesized
gcacagaucuugaugacu

SEQ ID NO: 2679 - RNA, 18 nt, artificial
  Chemically synthesized
gucccuuucaucuugaga

SEQ ID NO: 2680 - RNA, 18 nt, artificial
  Chemically synthesized
ggaagcauuugacccaga

SEQ ID NO: 2681 - RNA, 18 nt, artificial
  Chemically synthesized
ggcagacugggaggguau

SEQ ID NO: 2682 - RNA, 18 nt, artificial
  Chemically synthesized
gcuuuguaucauucuuga

SEQ ID NO: 2683 - RNA, 18 nt, artificial
  Chemically synthesized
gaggaagccgcucaaaua

SEQ ID NO: 2684 - RNA, 18 nt, artificial
  Chemically synthesized
ccuucuccuuuuagacau

SEQ ID NO: 2685 - RNA, 18 nt, artificial
  Chemically synthesized
gggcguggucuugcaaaa

SEQ ID NO: 2686 - RNA, 18 nt, artificial
  Chemically synthesized
gcugagcagaaaacaaaa

SEQ ID NO: 2687 - RNA, 18 nt, artificial
  Chemically synthesized
gaccaguccaugugauuu

SEQ ID NO: 2688 - RNA, 18 nt, artificial
  Chemically synthesized
gagaaucucuuguuuccu

SEQ ID NO: 2689 - RNA, 18 nt, artificial
  Chemically synthesized
uccuauuaauccucagaa

SEQ ID NO: 2690 - RNA, 18 nt, artificial
  Chemically synthesized
cacagagaagaacaucaa

SEQ ID NO: 2691 - RNA, 18 nt, artificial
  Chemically synthesized
gccugcaucaagagaagu

SEQ ID NO: 2692 - RNA, 18 nt, artificial
  Chemically synthesized
ggugacacacucacuucu

SEQ ID NO: 2693 - RNA, 18 nt, artificial
  Chemically synthesized
aggaaagaaggaauaucu

SEQ ID NO: 2694 - RNA, 18 nt, artificial
  Chemically synthesized
ccaccuguguuguaaaga

SEQ ID NO: 2695 - RNA, 18 nt, artificial
  Chemically synthesized
guccaugugauuucagua

SEQ ID NO: 2696 - RNA, 18 nt, artificial
  Chemically synthesized
aguggacucuggaaacga

SEQ ID NO: 2697 - RNA, 18 nt, artificial
  Chemically synthesized
gacaucagcuguaaucau

SEQ ID NO: 2698 - RNA, 18 nt, artificial
  Chemically synthesized
gccuguucuauucagcgg

SEQ ID NO: 2699 - RNA, 18 nt, artificial
  Chemically synthesized
agaucaagcagauaaaga

SEQ ID NO: 2700 - RNA, 18 nt, artificial
  Chemically synthesized
gucucugaugcuuuguau

SEQ ID NO: 2701 - RNA, 18 nt, artificial
  Chemically synthesized
guucaaagggccugagaa

SEQ ID NO: 2702 - RNA, 18 nt, artificial
  Chemically synthesized
gggaacuagggaaccuau

SEQ ID NO: 2703 - RNA, 18 nt, artificial
  Chemically synthesized
augauaaggagaaucucu

SEQ ID NO: 2704 - RNA, 18 nt, artificial
  Chemically synthesized
cuuagccuguucuauuca

SEQ ID NO: 2705 - RNA, 18 nt, artificial
  Chemically synthesized
guaaugauaaggagaauc

SEQ ID NO: 2706 - RNA, 18 nt, artificial
  Chemically synthesized
ggacgagugccucuggau

SEQ ID NO: 2707 - RNA, 18 nt, artificial
  Chemically synthesized
cacaauaaauaguggcaa

SEQ ID NO: 2708 - RNA, 18 nt, artificial
  Chemically synthesized
guuggaggaaagaaggaa

SEQ ID NO: 2709 - RNA, 18 nt, artificial
  Chemically synthesized
agguauuagacuugcacu

SEQ ID NO: 2710 - RNA, 18 nt, artificial
  Chemically synthesized
acacaagaguuguugaaa

SEQ ID NO: 2711 - RNA, 18 nt, artificial
  Chemically synthesized
ccuauguguucccucagu

SEQ ID NO: 2712 - RNA, 18 nt, artificial
  Chemically synthesized
caaugcagauguagugau

SEQ ID NO: 2713 - RNA, 18 nt, artificial
  Chemically synthesized
gaauaugaagucugagac

SEQ ID NO: 2714 - RNA, 18 nt, artificial
  Chemically synthesized
ccuccaaggguuucgacu

SEQ ID NO: 2715 - RNA, 18 nt, artificial
  Chemically synthesized
gugguuuccugaagccag

SEQ ID NO: 2716 - RNA, 18 nt, artificial
  Chemically synthesized
uguucuauucagcggcaa

SEQ ID NO: 2717 - RNA, 18 nt, artificial
  Chemically synthesized
gaugauaggugaaccuga

SEQ ID NO: 2718 - RNA, 18 nt, artificial
  Chemically synthesized
gccucagcugagucuuuu

SEQ ID NO: 2719 - RNA, 18 nt, artificial
  Chemically synthesized
aggugaauucucagauga

SEQ ID NO: 2720 - RNA, 18 nt, artificial
  Chemically synthesized
agggagacguggguccaa

SEQ ID NO: 2721 - RNA, 18 nt, artificial
  Chemically synthesized
agaaggaaguggacucug

SEQ ID NO: 2722 - RNA, 18 nt, artificial
  Chemically synthesized
ggaagccgcucaaauacc

SEQ ID NO: 2723 - RNA, 18 nt, artificial
  Chemically synthesized
gcuguacagugaccuaaa

SEQ ID NO: 2724 - RNA, 18 nt, artificial
  Chemically synthesized
ggauaggaagaacuuucu

SEQ ID NO: 2725 - RNA, 18 nt, artificial
  Chemically synthesized
cccuucuccuuuuagaca

SEQ ID NO: 2726 - RNA, 18 nt, artificial
  Chemically synthesized
ccaccuuagccuguucua

SEQ ID NO: 2727 - RNA, 18 nt, artificial
  Chemically synthesized
gggcuucgauccuugggu

SEQ ID NO: 2728 - RNA, 18 nt, artificial
  Chemically synthesized
aguguucccucccucaaa

SEQ ID NO: 2729 - RNA, 18 nt, artificial
  Chemically synthesized
gaacuuucucgguaauga

SEQ ID NO: 2730 - RNA, 18 nt, artificial
  Chemically synthesized
gagaaggaaguggacucu

SEQ ID NO: 2731 - RNA, 18 nt, artificial
  Chemically synthesized
caucaauccuauuaaucc

SEQ ID NO: 2732 - RNA, 18 nt, artificial
  Chemically synthesized
gcaggaguuucucgacau

SEQ ID NO: 2733 - RNA, 18 nt, artificial
  Chemically synthesized
ggguuaggauaggaagaa

SEQ ID NO: 2734 - RNA, 18 nt, artificial
  Chemically synthesized
cugaugcuuuguaucauu

SEQ ID NO: 2735 - RNA, 18 nt, artificial
  Chemically synthesized
cagccucagcugagucuu

SEQ ID NO: 2736 - RNA, 18 nt, artificial
  Chemically synthesized
ggccuguuuuaagagaca

SEQ ID NO: 2737 - RNA, 18 nt, artificial
  Chemically synthesized
cauacacacgcaaugaaa

SEQ ID NO: 2738 - RNA, 18 nt, artificial
  Chemically synthesized
gcaccacccagaagaaga

SEQ ID NO: 2739 - RNA, 18 nt, artificial
  Chemically synthesized
cucugaugcuuuguauca

SEQ ID NO: 2740 - RNA, 18 nt, artificial
  Chemically synthesized
gggcuuucugcaugugac

SEQ ID NO: 2741 - RNA, 18 nt, artificial
  Chemically synthesized
cucuggaaacgacauuua

SEQ ID NO: 2742 - RNA, 18 nt, artificial
  Chemically synthesized
gauugaguugcacagcuu

SEQ ID NO: 2743 - RNA, 18 nt, artificial
  Chemically synthesized
gucagugagaaggaagug

SEQ ID NO: 2744 - RNA, 18 nt, artificial
  Chemically synthesized
ccagcuugcaggaggaau

SEQ ID NO: 2745 - RNA, 18 nt, artificial
  Chemically synthesized
cccuguucgcuuccugua

SEQ ID NO: 2746 - RNA, 18 nt, artificial
  Chemically synthesized
cauggguccaaauuaaua

SEQ ID NO: 2747 - RNA, 18 nt, artificial
  Chemically synthesized
cucuguugauuuuguuuc

SEQ ID NO: 2748 - RNA, 18 nt, artificial
  Chemically synthesized
ggaaggauuuuggaggua

SEQ ID NO: 2749 - RNA, 18 nt, artificial
  Chemically synthesized
ggaacuagggaaccuaug

SEQ ID NO: 2750 - RNA, 18 nt, artificial
  Chemically synthesized
ccuggauugaguugcaca

SEQ ID NO: 2751 - RNA, 18 nt, artificial
  Chemically synthesized
gccuggaaaugugcauuu

SEQ ID NO: 2752 - RNA, 18 nt, artificial
  Chemically synthesized
ggccaaagcggucaguga

SEQ ID NO: 2753 - RNA, 18 nt, artificial
  Chemically synthesized
acuucugcuuguauuucu

SEQ ID NO: 2754 - RNA, 18 nt, artificial
  Chemically synthesized
cccuuucuagggcagacu

SEQ ID NO: 2755 - RNA, 18 nt, artificial
  Chemically synthesized
ccuggucagcacagaucu

SEQ ID NO: 2756 - RNA, 18 nt, artificial
  Chemically synthesized
ggguccaagguccucauc

SEQ ID NO: 2757 - RNA, 18 nt, artificial
  Chemically synthesized
cuguauggugauaucaua

SEQ ID NO: 2758 - RNA, 18 nt, artificial
  Chemically synthesized
uggacuugcugccguaau

SEQ ID NO: 2759 - RNA, 18 nt, artificial
  Chemically synthesized
ccuguucgcuuccuguau

SEQ ID NO: 2760 - RNA, 18 nt, artificial
  Chemically synthesized
gugacacacucacuucuu

SEQ ID NO: 2761 - RNA, 18 nt, artificial
  Chemically synthesized
gguggauuccuucagguc

SEQ ID NO: 2762 - RNA, 18 nt, artificial
  Chemically synthesized
cccaucaauccuauuaau

SEQ ID NO: 2763 - RNA, 18 nt, artificial
  Chemically synthesized
gcuaguucuugaaggagc

SEQ ID NO: 2764 - RNA, 18 nt, artificial
  Chemically synthesized
guggguccaagguccuca

SEQ ID NO: 2765 - RNA, 18 nt, artificial
  Chemically synthesized
gcuuccaaagccaccuua

SEQ ID NO: 2766 - RNA, 18 nt, artificial
  Chemically synthesized
ggucacagagaagaacau

SEQ ID NO: 2767 - RNA, 18 nt, artificial
  Chemically synthesized
gcaucaagagaagugacg

SEQ ID NO: 2768 - RNA, 18 nt, artificial
  Chemically synthesized
uggucuugcaaaaugcuu

SEQ ID NO: 2769 - RNA, 18 nt, artificial
  Chemically synthesized
agcaggaguuucucgaca

SEQ ID NO: 2770 - RNA, 18 nt, artificial
  Chemically synthesized
guugaaaguugacaagca

SEQ ID NO: 2771 - RNA, 18 nt, artificial
  Chemically synthesized
ggucuugcaaaaugcuuc

SEQ ID NO: 2772 - RNA, 18 nt, artificial
  Chemically synthesized
guguuuaugcuggaauau

SEQ ID NO: 2773 - RNA, 18 nt, artificial
  Chemically synthesized
gcagaaaacaaaacaggu

SEQ ID NO: 2774 - RNA, 18 nt, artificial
  Chemically synthesized
accuaaaguugguaagau

SEQ ID NO: 2775 - RNA, 18 nt, artificial
  Chemically synthesized
agcagacugcgcaugucu

SEQ ID NO: 2776 - RNA, 18 nt, artificial
  Chemically synthesized
agccuguucuauucagcg

SEQ ID NO: 2777 - RNA, 18 nt, artificial
  Chemically synthesized
ggcagcacuuagggaucu

SEQ ID NO: 2778 - RNA, 18 nt, artificial
  Chemically synthesized
cauuuauggcaacccuau

SEQ ID NO: 2779 - RNA, 18 nt, artificial
  Chemically synthesized
ggcucuccauuuggcauc

SEQ ID NO: 2780 - RNA, 18 nt, artificial
  Chemically synthesized
uguuucugcugauuguuu

SEQ ID NO: 2781 - RNA, 18 nt, artificial
  Chemically synthesized
gcugcgagugcaagauca

SEQ ID NO: 2782 - RNA, 18 nt, artificial
  Chemically synthesized
cuuucucgguaaugauaa

SEQ ID NO: 2783 - RNA, 18 nt, artificial
  Chemically synthesized
guuuccguuuggauuuuu

SEQ ID NO: 2784 - RNA, 18 nt, artificial
  Chemically synthesized
gggcugcgagugcaagau

SEQ ID NO: 2785 - RNA, 18 nt, artificial
  Chemically synthesized
ccugaguugcagauauac

SEQ ID NO: 2786 - RNA, 18 nt, artificial
  Chemically synthesized
guuuccugaagccaguga

SEQ ID NO: 2787 - RNA, 18 nt, artificial
  Chemically synthesized
ggauuuuggagguaggug

SEQ ID NO: 2788 - RNA, 18 nt, artificial
  Chemically synthesized
gcaaaaaaagccuccaag

SEQ ID NO: 2789 - RNA, 18 nt, artificial
  Chemically synthesized
ccaaguucuucgccugca

SEQ ID NO: 2790 - RNA, 18 nt, artificial
  Chemically synthesized
guucccucagugugguuu

SEQ ID NO: 2791 - RNA, 18 nt, artificial
  Chemically synthesized
ggagcacuguguuuaugc

SEQ ID NO: 2792 - RNA, 18 nt, artificial
  Chemically synthesized
uaagaaggcucuccauuu

SEQ ID NO: 2793 - RNA, 18 nt, artificial
  Chemically synthesized
gcguuuucaugcuguaca

SEQ ID NO: 2794 - RNA, 18 nt, artificial
  Chemically synthesized
gguucggucugaaaggug

SEQ ID NO: 2795 - RNA, 18 nt, artificial
  Chemically synthesized
gauuaccuagcuaagaaa

SEQ ID NO: 2796 - RNA, 18 nt, artificial
  Chemically synthesized
cuuucaucuugagaggga

SEQ ID NO: 2797 - RNA, 18 nt, artificial
  Chemically synthesized
agggcagccuggaaccag

SEQ ID NO: 2798 - RNA, 18 nt, artificial
  Chemically synthesized
gggacacgcggcuucccu

SEQ ID NO: 2799 - RNA, 18 nt, artificial
  Chemically synthesized
ccuaggaagggaaggauu

SEQ ID NO: 2800 - RNA, 18 nt, artificial
  Chemically synthesized
ccaagggcagccuggaac

SEQ ID NO: 2801 - RNA, 18 nt, artificial
  Chemically synthesized
auaugaagucugagaccu

SEQ ID NO: 2802 - RNA, 18 nt, artificial
  Chemically synthesized
ggacucuggaaacgacau

SEQ ID NO: 2803 - RNA, 18 nt, artificial
  Chemically synthesized
ccugaagccagugauaug

SEQ ID NO: 2804 - RNA, 18 nt, artificial
  Chemically synthesized
ggacuugcugccguaauu

SEQ ID NO: 2805 - RNA, 18 nt, artificial
  Chemically synthesized
acggcaagaugcacauca

SEQ ID NO: 2806 - RNA, 18 nt, artificial
  Chemically synthesized
caagaguuguugaaaguu

SEQ ID NO: 2807 - RNA, 18 nt, artificial
  Chemically synthesized
ggucagcacagaucuuga

SEQ ID NO: 2808 - RNA, 18 nt, artificial
  Chemically synthesized
agggaacuagggaaccua

SEQ ID NO: 2809 - RNA, 18 nt, artificial
  Chemically synthesized
cggacgagugccucugga

SEQ ID NO: 2810 - RNA, 18 nt, artificial
  Chemically synthesized
cuccaguucaaauuauug

SEQ ID NO: 2811 - RNA, 18 nt, artificial
  Chemically synthesized
caugguugugggucugga

SEQ ID NO: 2812 - RNA, 18 nt, artificial
  Chemically synthesized
aggugaaccugaguugca

SEQ ID NO: 2813 - RNA, 18 nt, artificial
  Chemically synthesized
ggugagguccuguccuga

SEQ ID NO: 2814 - RNA, 18 nt, artificial
  Chemically synthesized
cagugugguuuccugaag

SEQ ID NO: 2815 - RNA, 18 nt, artificial
  Chemically synthesized
gaagaagagccugaacca

SEQ ID NO: 2816 - RNA, 18 nt, artificial
  Chemically synthesized
gguagguggcuuugguga

SEQ ID NO: 2817 - RNA, 18 nt, artificial
  Chemically synthesized
cccucaaggucccuuccc

SEQ ID NO: 2818 - RNA, 18 nt, artificial
  Chemically synthesized
ucgccugcaucaagagaa

SEQ ID NO: 2819 - RNA, 18 nt, artificial
  Chemically synthesized
agcauuugacccagagug

SEQ ID NO: 2820 - RNA, 18 nt, artificial
  Chemically synthesized
gggucuugcugugcccuc

SEQ ID NO: 2821 - RNA, 18 nt, artificial
  Chemically synthesized
gccuccugcugcuggcga

SEQ ID NO: 2822 - RNA, 18 nt, artificial
  Chemically synthesized
caggcuuaguguucccuc

SEQ ID NO: 2823 - RNA, 18 nt, artificial
  Chemically synthesized
ccagaagaagagccugaa

SEQ ID NO: 2824 - RNA, 18 nt, artificial
  Chemically synthesized
gacccagaguggaacgcg

SEQ ID NO: 2825 - RNA, 18 nt, artificial
  Chemically synthesized
agguguggccuuuauauu

SEQ ID NO: 2826 - RNA, 18 nt, artificial
  Chemically synthesized
cagugggagccucccucu

SEQ ID NO: 2827 - RNA, 18 nt, artificial
  Chemically synthesized
ugguucuccaguucaaau

SEQ ID NO: 2828 - RNA, 18 nt, artificial
  Chemically synthesized
gguuaagaagagccgggu

SEQ ID NO: 2829 - RNA, 18 nt, artificial
  Chemically synthesized
aaggagaaucucuuguuu

SEQ ID NO: 2830 - RNA, 18 nt, artificial
  Chemically synthesized
ucugaugcuuuguaucau

SEQ ID NO: 2831 - RNA, 18 nt, artificial
  Chemically synthesized
ccaggucccuuucaucuu

SEQ ID NO: 2832 - RNA, 18 nt, artificial
  Chemically synthesized
cacccucugugacuucau

SEQ ID NO: 2833 - RNA, 18 nt, artificial
  Chemically synthesized
cccuugguagguauuaga

SEQ ID NO: 2834 - RNA, 18 nt, artificial
  Chemically synthesized
cuauguguucccucagug

SEQ ID NO: 2835 - RNA, 18 nt, artificial
  Chemically synthesized
gagccugaaccacaggua

SEQ ID NO: 2836 - RNA, 18 nt, artificial
  Chemically synthesized
ggcaagugcucccaucgc

SEQ ID NO: 2837 - RNA, 18 nt, artificial
  Chemically synthesized
gaauuccagugggagccu

SEQ ID NO: 2838 - RNA, 18 nt, artificial
  Chemically synthesized
gcaaugcagauguaguga

SEQ ID NO: 2839 - RNA, 18 nt, artificial
  Chemically synthesized
ccugagaaggauauagag

SEQ ID NO: 2840 - RNA, 18 nt, artificial
  Chemically synthesized
accugaguugcagauaua

SEQ ID NO: 2841 - RNA, 18 nt, artificial
  Chemically synthesized
gaccuaaaguugguaaga

SEQ ID NO: 2842 - RNA, 18 nt, artificial
  Chemically synthesized
gucuuugguucuccaguu

SEQ ID NO: 2843 - RNA, 18 nt, artificial
  Chemically synthesized
gccuaggaagggaaggau

SEQ ID NO: 2844 - RNA, 18 nt, artificial
  Chemically synthesized
cgcaugucucugaugcuu

SEQ ID NO: 2845 - RNA, 18 nt, artificial
  Chemically synthesized
caauccuauuaauccuca

SEQ ID NO: 2846 - RNA, 18 nt, artificial
  Chemically synthesized
agccucagcugagucuuu

SEQ ID NO: 2847 - RNA, 18 nt, artificial
  Chemically synthesized
gcucuguugauuuuguuu

SEQ ID NO: 2848 - RNA, 18 nt, artificial
  Chemically synthesized
gugggagccucccucuga

SEQ ID NO: 2849 - RNA, 18 nt, artificial
  Chemically synthesized
gacucuggaaacgacauu

SEQ ID NO: 2850 - RNA, 18 nt, artificial
  Chemically synthesized
agcauaguaagaagucca

SEQ ID NO: 2851 - RNA, 18 nt, artificial
  Chemically synthesized
cagaggaagccgcucaaa

SEQ ID NO: 2852 - RNA, 18 nt, artificial
  Chemically synthesized
guugguaagaugucauaa

SEQ ID NO: 2853 - RNA, 18 nt, artificial
  Chemically synthesized
cuauuuucauccugcaag

SEQ ID NO: 2854 - RNA, 18 nt, artificial
  Chemically synthesized
aguugcagauauaccaac

SEQ ID NO: 2855 - RNA, 18 nt, artificial
  Chemically synthesized
aaugauaaggagaaucuc

SEQ ID NO: 2856 - RNA, 18 nt, artificial
  Chemically synthesized
ggagaaucucuuguuucc

SEQ ID NO: 2857 - RNA, 18 nt, artificial
  Chemically synthesized
guaagaugucauaaugga

SEQ ID NO: 2858 - RNA, 18 nt, artificial
  Chemically synthesized
ccuugguagguauuagac

SEQ ID NO: 2859 - RNA, 18 nt, artificial
  Chemically synthesized
ggcugggacacgcggcuu

SEQ ID NO: 2860 - RNA, 18 nt, artificial
  Chemically synthesized
cacaagaguuguugaaag

SEQ ID NO: 2861 - RNA, 18 nt, artificial
  Chemically synthesized
gagggucguugcaagacu

SEQ ID NO: 2862 - RNA, 18 nt, artificial
  Chemically synthesized
aaacgacauuuauggcaa

SEQ ID NO: 2863 - RNA, 18 nt, artificial
  Chemically synthesized
ugaugacuucccuuucua

SEQ ID NO: 2864 - RNA, 18 nt, artificial
  Chemically synthesized
ggcuuaguguucccuccc

SEQ ID NO: 2865 - RNA, 18 nt, artificial
  Chemically synthesized
cagagaagaacaucaacg

SEQ ID NO: 2866 - RNA, 18 nt, artificial
  Chemically synthesized
ccagccucagcugagucu

SEQ ID NO: 2867 - RNA, 18 nt, artificial
  Chemically synthesized
gggacacccugagcacca

SEQ ID NO: 2868 - RNA, 18 nt, artificial
  Chemically synthesized
cucacuucuuucucagcc

SEQ ID NO: 2869 - RNA, 18 nt, artificial
  Chemically synthesized
gacaucccuuccuggaaa

SEQ ID NO: 2870 - RNA, 18 nt, artificial
  Chemically synthesized
ccuggcaagugcucccau

SEQ ID NO: 2871 - RNA, 18 nt, artificial
  Chemically synthesized
agaaaugggagcgagaaa

SEQ ID NO: 2872 - RNA, 18 nt, artificial
  Chemically synthesized
gcaaugaaaccgaagcuu

SEQ ID NO: 2873 - RNA, 18 nt, artificial
  Chemically synthesized
augucauaauggaccagu

SEQ ID NO: 2874 - RNA, 18 nt, artificial
  Chemically synthesized
ugugguuuccugaagcca

SEQ ID NO: 2875 - RNA, 18 nt, artificial
  Chemically synthesized
gauauacaggcacauuau

SEQ ID NO: 2876 - RNA, 18 nt, artificial
  Chemically synthesized
aaaaaagccuccaagggu

SEQ ID NO: 2877 - RNA, 18 nt, artificial
  Chemically synthesized
guauggugauaucauaug

SEQ ID NO: 2878 - RNA, 18 nt, artificial
  Chemically synthesized
ccugugcuguguuuuuua

SEQ ID NO: 2879 - RNA, 18 nt, artificial
  Chemically synthesized
aggccaaguucuucgccu

SEQ ID NO: 2880 - RNA, 18 nt, artificial
  Chemically synthesized
ugcagauauaccaacuuc

SEQ ID NO: 2881 - RNA, 18 nt, artificial
  Chemically synthesized
agaaggaauaucucauug

SEQ ID NO: 2882 - RNA, 18 nt, artificial
  Chemically synthesized
gaaggauuuuggagguag

SEQ ID NO: 2883 - RNA, 18 nt, artificial
  Chemically synthesized
gcggcuucccucccaguc

SEQ ID NO: 2884 - RNA, 18 nt, artificial
  Chemically synthesized
cucagaauuccaguggga

SEQ ID NO: 2885 - RNA, 18 nt, artificial
  Chemically synthesized
gauggacugggucacaga

SEQ ID NO: 2886 - RNA, 18 nt, artificial
  Chemically synthesized
auaucucauugcaggaaa

SEQ ID NO: 2887 - RNA, 18 nt, artificial
  Chemically synthesized
acauuuauggcaacccua

SEQ ID NO: 2888 - RNA, 18 nt, artificial
  Chemically synthesized
uuaagaaggcucuccauu

SEQ ID NO: 2889 - RNA, 18 nt, artificial
  Chemically synthesized
gcaaaaugcuuccaaagc

SEQ ID NO: 2890 - RNA, 18 nt, artificial
  Chemically synthesized
cucccucaaagacugaca

SEQ ID NO: 2891 - RNA, 18 nt, artificial
  Chemically synthesized
gccucuggauggacuggg

SEQ ID NO: 2892 - RNA, 18 nt, artificial
  Chemically synthesized
cguuggucuuuuaaccgu

SEQ ID NO: 2893 - RNA, 18 nt, artificial
  Chemically synthesized
aggaauaucucauugcag

SEQ ID NO: 2894 - RNA, 18 nt, artificial
  Chemically synthesized
gaguuuaucuacacggcc

SEQ ID NO: 2895 - RNA, 18 nt, artificial
  Chemically synthesized
uuuucauccugcaagcaa

SEQ ID NO: 2896 - RNA, 18 nt, artificial
  Chemically synthesized
caaagcggucagugagaa

SEQ ID NO: 2897 - RNA, 18 nt, artificial
  Chemically synthesized
guuucugcugauuguuuu

SEQ ID NO: 2898 - RNA, 18 nt, artificial
  Chemically synthesized
aaaggugaauucucagau

SEQ ID NO: 2899 - RNA, 18 nt, artificial
  Chemically synthesized
gagugccucuggauggac

SEQ ID NO: 2900 - RNA, 18 nt, artificial
  Chemically synthesized
caaagauuaccuagcuaa

SEQ ID NO: 2901 - RNA, 18 nt, artificial
  Chemically synthesized
ccagcucugacaucccuu

SEQ ID NO: 2902 - RNA, 18 nt, artificial
  Chemically synthesized
guucuucgccugcaucaa

SEQ ID NO: 2903 - RNA, 18 nt, artificial
  Chemically synthesized
ggcuccugugcgugguac

SEQ ID NO: 2904 - RNA, 18 nt, artificial
  Chemically synthesized
uagacaugguuguggguc

SEQ ID NO: 2905 - RNA, 18 nt, artificial
  Chemically synthesized
agaaguccagccuaggaa

SEQ ID NO: 2906 - RNA, 18 nt, artificial
  Chemically synthesized
gcaagacuguguagcagg

SEQ ID NO: 2907 - RNA, 18 nt, artificial
  Chemically synthesized
gcucucuucuccuauuuu

SEQ ID NO: 2908 - RNA, 18 nt, artificial
  Chemically synthesized
ggcaagaugcacaucacc

SEQ ID NO: 2909 - RNA, 18 nt, artificial
  Chemically synthesized
gaagaacuuucucgguaa

SEQ ID NO: 2910 - RNA, 18 nt, artificial
  Chemically synthesized
agaguuguugaaaguuga

SEQ ID NO: 2911 - RNA, 18 nt, artificial
  Chemically synthesized
guauauacaacuccacca

SEQ ID NO: 2912 - RNA, 18 nt, artificial
  Chemically synthesized
gcuuaguguucccucccu

SEQ ID NO: 2913 - RNA, 18 nt, artificial
  Chemically synthesized
gcucugacaucccuuccu

SEQ ID NO: 2914 - RNA, 18 nt, artificial
  Chemically synthesized
cccauggguccaaauuaa

SEQ ID NO: 2915 - RNA, 18 nt, artificial
  Chemically synthesized
uggccaacugcaaaaaaa

SEQ ID NO: 2916 - RNA, 18 nt, artificial
  Chemically synthesized
ggacacuauggccuguuu

SEQ ID NO: 2917 - RNA, 18 nt, artificial
  Chemically synthesized
gccagcuaagcauaguaa

SEQ ID NO: 2918 - RNA, 18 nt, artificial
  Chemically synthesized
ccaaggguuucgacuggu

SEQ ID NO: 2919 - RNA, 18 nt, artificial
  Chemically synthesized
agaugcacaucacccucu

SEQ ID NO: 2920 - RNA, 18 nt, artificial
  Chemically synthesized
ggcagggccuggaaaugu

SEQ ID NO: 2921 - RNA, 18 nt, artificial
  Chemically synthesized
gguccucaucccauccuc

SEQ ID NO: 2922 - RNA, 18 nt, artificial
  Chemically synthesized
cgacauuuauggcaaccc

SEQ ID NO: 2923 - RNA, 18 nt, artificial
  Chemically synthesized
gccuuguagaaaugggag

SEQ ID NO: 2924 - RNA, 18 nt, artificial
  Chemically synthesized
caguccaugugauuucag

SEQ ID NO: 2925 - RNA, 18 nt, artificial
  Chemically synthesized
ggagacguggguccaagg

SEQ ID NO: 2926 - RNA, 18 nt, artificial
  Chemically synthesized
cagcuuugcuuuauccgg

SEQ ID NO: 2927 - RNA, 18 nt, artificial
  Chemically synthesized
ugcaagcaacucaaaaua

SEQ ID NO: 2928 - RNA, 18 nt, artificial
  Chemically synthesized
ccuuucuagggcagacug

SEQ ID NO: 2929 - RNA, 18 nt, artificial
  Chemically synthesized
ccuggaaaugugcauuuu

SEQ ID NO: 2930 - RNA, 18 nt, artificial
  Chemically synthesized
auggcaacccuaucaaga

SEQ ID NO: 2931 - RNA, 18 nt, artificial
  Chemically synthesized
gccauugcuucuugccug

SEQ ID NO: 2932 - RNA, 18 nt, artificial
  Chemically synthesized
ggaaccuauguguucccu

SEQ ID NO: 2933 - RNA, 18 nt, artificial
  Chemically synthesized
gauauaccaacuucugcu

SEQ ID NO: 2934 - RNA, 18 nt, artificial
  Chemically synthesized
guuuguuuuugacaucag

SEQ ID NO: 2935 - RNA, 18 nt, artificial
  Chemically synthesized
ugcacagcuuugcuuuau

SEQ ID NO: 2936 - RNA, 18 nt, artificial
  Chemically synthesized
ccuauuuucauccugcaa

SEQ ID NO: 2937 - RNA, 18 nt, artificial
  Chemically synthesized
ugccauugcuucuugccu

SEQ ID NO: 2938 - RNA, 18 nt, artificial
  Chemically synthesized
accaacuucugcuuguau

SEQ ID NO: 2939 - RNA, 18 nt, artificial
  Chemically synthesized
gguccuguccugaggcug

SEQ ID NO: 2940 - RNA, 18 nt, artificial
  Chemically synthesized
augcagauguagugauca

SEQ ID NO: 2941 - RNA, 18 nt, artificial
  Chemically synthesized
gcuaagcauaguaagaag

SEQ ID NO: 2942 - RNA, 18 nt, artificial
  Chemically synthesized
guucccucccucaaagac

SEQ ID NO: 2943 - RNA, 18 nt, artificial
  Chemically synthesized
agcuguaaucauuccugu

SEQ ID NO: 2944 - RNA, 18 nt, artificial
  Chemically synthesized
gcaugugacgccagcuaa

SEQ ID NO: 2945 - RNA, 18 nt, artificial
  Chemically synthesized
gcacagcuuugcuuuauc

SEQ ID NO: 2946 - RNA, 18 nt, artificial
  Chemically synthesized
gagccucccucugagccu

SEQ ID NO: 2947 - RNA, 18 nt, artificial
  Chemically synthesized
ggcaccaggccaaguucu

SEQ ID NO: 2948 - RNA, 18 nt, artificial
  Chemically synthesized
cagcacagaucuugauga

SEQ ID NO: 2949 - RNA, 18 nt, artificial
  Chemically synthesized
uguucuaagcacagcucu

SEQ ID NO: 2950 - RNA, 18 nt, artificial
  Chemically synthesized
ugagcagaaaacaaaaca

SEQ ID NO: 2951 - RNA, 18 nt, artificial
  Chemically synthesized
gggaacacacaagaguug

SEQ ID NO: 2952 - RNA, 18 nt, artificial
  Chemically synthesized
cccucaaagacugacagc

SEQ ID NO: 2953 - RNA, 18 nt, artificial
  Chemically synthesized
ccuuguuuucugcagcuu

SEQ ID NO: 2954 - RNA, 18 nt, artificial
  Chemically synthesized
cuggaaacgacauuuaug

SEQ ID NO: 2955 - RNA, 18 nt, artificial
  Chemically synthesized
gcaagaugcacaucaccc

SEQ ID NO: 2956 - RNA, 18 nt, artificial
  Chemically synthesized
ucagaauuccagugggag

SEQ ID NO: 2957 - RNA, 18 nt, artificial
  Chemically synthesized
uguugauuuuguuuccgu

SEQ ID NO: 2958 - RNA, 18 nt, artificial
  Chemically synthesized
ugcuggaauaugaagucu

SEQ ID NO: 2959 - RNA, 18 nt, artificial
  Chemically synthesized
guuguugaaaguugacaa

SEQ ID NO: 2960 - RNA, 18 nt, artificial
  Chemically synthesized
ggucguugcaagacugug

SEQ ID NO: 2961 - RNA, 18 nt, artificial
  Chemically synthesized
guagguauuagacuugca

SEQ ID NO: 2962 - RNA, 18 nt, artificial
  Chemically synthesized
cuuuguaucauucuugag

SEQ ID NO: 2963 - RNA, 18 nt, artificial
  Chemically synthesized
gggagcacuguguuuaug

SEQ ID NO: 2964 - RNA, 18 nt, artificial
  Chemically synthesized
ugucucugaugcuuugua

SEQ ID NO: 2965 - RNA, 18 nt, artificial
  Chemically synthesized
guuccagccucagcugag

SEQ ID NO: 2966 - RNA, 18 nt, artificial
  Chemically synthesized
gguuaggauaggaagaac

SEQ ID NO: 2967 - RNA, 18 nt, artificial
  Chemically synthesized
auauacaacuccaccaga

SEQ ID NO: 2968 - RNA, 18 nt, artificial
  Chemically synthesized
ucugagccuuguagaaau

SEQ ID NO: 2969 - RNA, 18 nt, artificial
  Chemically synthesized
gugagguccuguccugag

SEQ ID NO: 2970 - RNA, 18 nt, artificial
  Chemically synthesized
ggguggcagcugacagag

SEQ ID NO: 2971 - RNA, 18 nt, artificial
  Chemically synthesized
caagcagacugcgcaugu

SEQ ID NO: 2972 - RNA, 18 nt, artificial
  Chemically synthesized
cucccucugagccuugua

SEQ ID NO: 2973 - RNA, 18 nt, artificial
  Chemically synthesized
ggagguagguggcuuugg

SEQ ID NO: 2974 - RNA, 18 nt, artificial
  Chemically synthesized
gagcagaaaacaaaacag

SEQ ID NO: 2975 - RNA, 18 nt, artificial
  Chemically synthesized
agaaggcucuccauuugg

SEQ ID NO: 2976 - RNA, 18 nt, artificial
  Chemically synthesized
uaugaagucugagaccuu

SEQ ID NO: 2977 - RNA, 18 nt, artificial
  Chemically synthesized
aacauuuacuccuguuuc

SEQ ID NO: 2978 - RNA, 18 nt, artificial
  Chemically synthesized
gacgagugccucuggaug

SEQ ID NO: 2979 - RNA, 18 nt, artificial
  Chemically synthesized
cugggucacagagaagaa

SEQ ID NO: 2980 - RNA, 18 nt, artificial
  Chemically synthesized
cuaggaagggaaggauuu

SEQ ID NO: 2981 - RNA, 18 nt, artificial
  Chemically synthesized
cggcuucccucccagucc

SEQ ID NO: 2982 - RNA, 18 nt, artificial
  Chemically synthesized
ccagugggagccucccuc

SEQ ID NO: 2983 - RNA, 18 nt, artificial
  Chemically synthesized
gaguuucucgacaucgag

SEQ ID NO: 2984 - RNA, 18 nt, artificial
  Chemically synthesized
agaagagccggguggcag

SEQ ID NO: 2985 - RNA, 18 nt, artificial
  Chemically synthesized
acaucagcuguaaucauu

SEQ ID NO: 2986 - RNA, 18 nt, artificial
  Chemically synthesized
cucagaugauaggugaac

SEQ ID NO: 2987 - RNA, 18 nt, artificial
  Chemically synthesized
gcagguggauuccuucag

SEQ ID NO: 2988 - RNA, 18 nt, artificial
  Chemically synthesized
gcgcaugucucugaugcu

SEQ ID NO: 2989 - RNA, 18 nt, artificial
  Chemically synthesized
caguauauacaacuccac

SEQ ID NO: 2990 - RNA, 18 nt, artificial
  Chemically synthesized
cauucuugagcaaucgcu

SEQ ID NO: 2991 - RNA, 18 nt, artificial
  Chemically synthesized
ccuccucggcagugugug

SEQ ID NO: 2992 - RNA, 18 nt, artificial
  Chemically synthesized
uccuguuucugcugauug

SEQ ID NO: 2993 - RNA, 18 nt, artificial
  Chemically synthesized
cccuccucggcagugugu

SEQ ID NO: 2994 - RNA, 18 nt, artificial
  Chemically synthesized
uacccuugguagguauua

SEQ ID NO: 2995 - RNA, 18 nt, artificial
  Chemically synthesized
gcuuccuguauggugaua

SEQ ID NO: 2996 - RNA, 18 nt, artificial
  Chemically synthesized
ggacauggcccuuguuuu

SEQ ID NO: 2997 - RNA, 18 nt, artificial
  Chemically synthesized
gcaugaauaaaacacuca

SEQ ID NO: 2998 - RNA, 18 nt, artificial
  Chemically synthesized
ccuguuucugcugauugu

SEQ ID NO: 2999 - RNA, 18 nt, artificial
  Chemically synthesized
gcacaucacccucuguga

SEQ ID NO: 3000 - RNA, 18 nt, artificial
  Chemically synthesized
gccgcucaaauaccuuca

SEQ ID NO: 3001 - RNA, 18 nt, artificial
  Chemically synthesized
gcaacaggcguuuugcaa

SEQ ID NO: 3002 - RNA, 18 nt, artificial
  Chemically synthesized
gggacggcaagaugcaca

SEQ ID NO: 3003 - RNA, 18 nt, artificial
  Chemically synthesized
gccaggcacuaugugucu

SEQ ID NO: 3004 - RNA, 18 nt, artificial
  Chemically synthesized
gacacacucacuucuuuc

SEQ ID NO: 3005 - RNA, 18 nt, artificial
  Chemically synthesized
cugagaccuuccggugcu

SEQ ID NO: 3006 - RNA, 18 nt, artificial
  Chemically synthesized
cagaagaagagccugaac

SEQ ID NO: 3007 - RNA, 18 nt, artificial
  Chemically synthesized
gauaggugaaccugaguu

SEQ ID NO: 3008 - RNA, 18 nt, artificial
  Chemically synthesized
guucuauucagcggcaac

SEQ ID NO: 3009 - RNA, 18 nt, artificial
  Chemically synthesized
agacugggaggguaucca

SEQ ID NO: 3010 - RNA, 18 nt, artificial
  Chemically synthesized
ggccaacugcaaaaaaag

SEQ ID NO: 3011 - RNA, 18 nt, artificial
  Chemically synthesized
uggccuuuauauuugauc

SEQ ID NO: 3012 - RNA, 18 nt, artificial
  Chemically synthesized
gcugggaacacacaagag

SEQ ID NO: 3013 - RNA, 18 nt, artificial
  Chemically synthesized
guggaagcauuugaccca

SEQ ID NO: 3014 - RNA, 18 nt, artificial
  Chemically synthesized
ccaugaucccgugcuaca

SEQ ID NO: 3015 - RNA, 18 nt, artificial
  Chemically synthesized
caggcagcacuuagggau

SEQ ID NO: 3016 - RNA, 18 nt, artificial
  Chemically synthesized
gcaaaguaaaggaucuuu

SEQ ID NO: 3017 - RNA, 18 nt, artificial
  Chemically synthesized
guggacaauaaacaguau

SEQ ID NO: 3018 - RNA, 18 nt, artificial
  Chemically synthesized
ugcaaaaaaagccuccaa

SEQ ID NO: 3019 - RNA, 18 nt, artificial
  Chemically synthesized
caagcaggaguuucucga

SEQ ID NO: 3020 - RNA, 18 nt, artificial
  Chemically synthesized
cguuccagccucagcuga

SEQ ID NO: 3021 - RNA, 18 nt, artificial
  Chemically synthesized
cgguccguggacaauaaa

SEQ ID NO: 3022 - RNA, 18 nt, artificial
  Chemically synthesized
uaggauaggaagaacuuu

SEQ ID NO: 3023 - RNA, 18 nt, artificial
  Chemically synthesized
agcugagucuuuuugguc

SEQ ID NO: 3024 - RNA, 18 nt, artificial
  Chemically synthesized
uggcuuuggugacacacu

SEQ ID NO: 3025 - RNA, 18 nt, artificial
  Chemically synthesized
gccgguggcugcccucaa

SEQ ID NO: 3026 - RNA, 18 nt, artificial
  Chemically synthesized
ccuggaaccaguggcuag

SEQ ID NO: 3027 - RNA, 18 nt, artificial
  Chemically synthesized
gccuguucuggcaucagg

SEQ ID NO: 3028 - RNA, 18 nt, artificial
  Chemically synthesized
gacagaaaaagcuggguc

SEQ ID NO: 3029 - RNA, 18 nt, artificial
  Chemically synthesized
cagccuccaggacacuau

SEQ ID NO: 3030 - RNA, 18 nt, artificial
  Chemically synthesized
gaagcauuugacccagag

SEQ ID NO: 3031 - RNA, 18 nt, artificial
  Chemically synthesized
ggcaucaggcaccuggau

SEQ ID NO: 3032 - RNA, 18 nt, artificial
  Chemically synthesized
aggauaggaagaacuuuc

SEQ ID NO: 3033 - RNA, 18 nt, artificial
  Chemically synthesized
agugcaagaucacgcgcu

SEQ ID NO: 3034 - RNA, 18 nt, artificial
  Chemically synthesized
cuucgauccuugggugca

SEQ ID NO: 3035 - RNA, 18 nt, artificial
  Chemically synthesized
guaaaggaucuuugagua

SEQ ID NO: 3036 - RNA, 18 nt, artificial
  Chemically synthesized
caggcaccuggauugagu

SEQ ID NO: 3037 - RNA, 18 nt, artificial
  Chemically synthesized
auaaggagaaucucuugu

SEQ ID NO: 3038 - RNA, 18 nt, artificial
  Chemically synthesized
uucccucccucaaagacu

SEQ ID NO: 3039 - RNA, 18 nt, artificial
  Chemically synthesized
ucuggaaacgacauuuau

SEQ ID NO: 3040 - RNA, 18 nt, artificial
  Chemically synthesized
guaagaaguccagccuag

SEQ ID NO: 3041 - RNA, 18 nt, artificial
  Chemically synthesized
caaaacagguuaagaaga

SEQ ID NO: 3042 - RNA, 18 nt, artificial
  Chemically synthesized
gguugccauugcuucuug

SEQ ID NO: 3043 - RNA, 18 nt, artificial
  Chemically synthesized
agguccucaucccauccu

SEQ ID NO: 3044 - RNA, 18 nt, artificial
  Chemically synthesized
guccguggacaauaaaca

SEQ ID NO: 3045 - RNA, 18 nt, artificial
  Chemically synthesized
uguguuuaugcuggaaua

SEQ ID NO: 3046 - RNA, 18 nt, artificial
  Chemically synthesized
gggcguuuucaugcugua

SEQ ID NO: 3047 - RNA, 18 nt, artificial
  Chemically synthesized
ggcaccuggauugaguug

SEQ ID NO: 3048 - RNA, 18 nt, artificial
  Chemically synthesized
cuguaaucauuccugugc

SEQ ID NO: 3049 - RNA, 18 nt, artificial
  Chemically synthesized
ggccuggaaaugugcauu

SEQ ID NO: 3050 - RNA, 18 nt, artificial
  Chemically synthesized
gggucguugcaagacugu

SEQ ID NO: 3051 - RNA, 18 nt, artificial
  Chemically synthesized
caggcguuuugcaaugca

SEQ ID NO: 3052 - RNA, 18 nt, artificial
  Chemically synthesized
aggguauccaggaaucgg

SEQ ID NO: 3053 - RNA, 18 nt, artificial
  Chemically synthesized
cuggaaaugugcauuuug

SEQ ID NO: 3054 - RNA, 18 nt, artificial
  Chemically synthesized
gguggcugcccucaaggu

SEQ ID NO: 3055 - RNA, 18 nt, artificial
  Chemically synthesized
gguccagcucugacaucc

SEQ ID NO: 3056 - RNA, 18 nt, artificial
  Chemically synthesized
gcggccugggcguggucu

SEQ ID NO: 3057 - RNA, 18 nt, artificial
  Chemically synthesized
ugcauuuugcagaaacuu

SEQ ID NO: 3058 - RNA, 18 nt, artificial
  Chemically synthesized
gucuuuuaaccgugcuga

SEQ ID NO: 3059 - RNA, 18 nt, artificial
  Chemically synthesized
cucaaggucccuucccua

SEQ ID NO: 3060 - RNA, 18 nt, artificial
  Chemically synthesized
auccaguaugagaucaag

SEQ ID NO: 3061 - RNA, 18 nt, artificial
  Chemically synthesized
gucugaaagguguggccu

SEQ ID NO: 3062 - RNA, 18 nt, artificial
  Chemically synthesized
gacguuggaggaaagaag

SEQ ID NO: 3063 - RNA, 18 nt, artificial
  Chemically synthesized
cuuguuuccucccaccug

SEQ ID NO: 3064 - RNA, 18 nt, artificial
  Chemically synthesized
gaccuggucagcacagau

SEQ ID NO: 3065 - RNA, 18 nt, artificial
  Chemically synthesized
guugcagauauaccaacu

SEQ ID NO: 3066 - RNA, 18 nt, artificial
  Chemically synthesized
ccacacacguuggucuuu

SEQ ID NO: 3067 - RNA, 18 nt, artificial
  Chemically synthesized
cccucugugacuucaucg

SEQ ID NO: 3068 - RNA, 18 nt, artificial
  Chemically synthesized
gauccuugggugcaggca

SEQ ID NO: 3069 - RNA, 18 nt, artificial
  Chemically synthesized
caaugaaaccgaagcuug

SEQ ID NO: 3070 - RNA, 18 nt, artificial
  Chemically synthesized
agccuuguagaaauggga

SEQ ID NO: 3071 - RNA, 18 nt, artificial
  Chemically synthesized
cuguucgcuuccuguaug

SEQ ID NO: 3072 - RNA, 18 nt, artificial
  Chemically synthesized
auguguucccucagugug

SEQ ID NO: 3073 - RNA, 18 nt, artificial
  Chemically synthesized
ccaagcaggcagcacuua

SEQ ID NO: 3074 - RNA, 18 nt, artificial
  Chemically synthesized
gcgagugcaagaucacgc

SEQ ID NO: 3075 - RNA, 18 nt, artificial
  Chemically synthesized
auaguuuaagaaggcucu

SEQ ID NO: 3076 - RNA, 18 nt, artificial
  Chemically synthesized
cagacugcgcaugucucu

SEQ ID NO: 3077 - RNA, 18 nt, artificial
  Chemically synthesized
ccuguuuuaagagacauc

SEQ ID NO: 3078 - RNA, 18 nt, artificial
  Chemically synthesized
ucaguauauacaacucca

SEQ ID NO: 3079 - RNA, 18 nt, artificial
  Chemically synthesized
cggcaagaugcacaucac

SEQ ID NO: 3080 - RNA, 18 nt, artificial
  Chemically synthesized
caucagcuguaaucauuc

SEQ ID NO: 3081 - RNA, 18 nt, artificial
  Chemically synthesized
gcaccuguuaagacuccu

SEQ ID NO: 3082 - RNA, 18 nt, artificial
  Chemically synthesized
gucugagaccuuccggug

SEQ ID NO: 3083 - RNA, 18 nt, artificial
  Chemically synthesized
cuucuuucucagccucca

SEQ ID NO: 3084 - RNA, 18 nt, artificial
  Chemically synthesized
gauaaggagaaucucuug

SEQ ID NO: 3085 - RNA, 18 nt, artificial
  Chemically synthesized
agauauaccaacuucugc

SEQ ID NO: 3086 - RNA, 18 nt, artificial
  Chemically synthesized
cuaugcagguggauuccu

SEQ ID NO: 3087 - RNA, 18 nt, artificial
  Chemically synthesized
aggaagccgcucaaauac

SEQ ID NO: 3088 - RNA, 18 nt, artificial
  Chemically synthesized
cgugcuacaucuccuccc

SEQ ID NO: 3089 - RNA, 18 nt, artificial
  Chemically synthesized
aaaaaagguuucugcauc

SEQ ID NO: 3090 - RNA, 18 nt, artificial
  Chemically synthesized
ggacacgcggcuucccuc

SEQ ID NO: 3091 - RNA, 18 nt, artificial
  Chemically synthesized
uagaguuuaucuacacgg

SEQ ID NO: 3092 - RNA, 18 nt, artificial
  Chemically synthesized
ucaaagacugacagccau

SEQ ID NO: 3093 - RNA, 18 nt, artificial
  Chemically synthesized
ugacaucagcuguaauca

SEQ ID NO: 3094 - RNA, 18 nt, artificial
  Chemically synthesized
aguugcacagcuuugcuu

SEQ ID NO: 3095 - RNA, 18 nt, artificial
  Chemically synthesized
aguggcuaguucuugaag

SEQ ID NO: 3096 - RNA, 18 nt, artificial
  Chemically synthesized
uggcaacccuaucaagag

SEQ ID NO: 3097 - RNA, 18 nt, artificial
  Chemically synthesized
guggcugcccucaagguc

SEQ ID NO: 3098 - RNA, 18 nt, artificial
  Chemically synthesized
gcguuuugcaaugcagau

SEQ ID NO: 3099 - RNA, 18 nt, artificial
  Chemically synthesized
gaucaagcagauaaagau

SEQ ID NO: 3100 - RNA, 18 nt, artificial
  Chemically synthesized
gcaggcagcacuuaggga

SEQ ID NO: 3101 - RNA, 18 nt, artificial
  Chemically synthesized
cuccaacccauauaacac

SEQ ID NO: 3102 - RNA, 18 nt, artificial
  Chemically synthesized
gaacuagggaaccuaugu

SEQ ID NO: 3103 - RNA, 18 nt, artificial
  Chemically synthesized
gacgauauacaggcacau

SEQ ID NO: 3104 - RNA, 18 nt, artificial
  Chemically synthesized
gaaauauuggacuugcug

SEQ ID NO: 3105 - RNA, 18 nt, artificial
  Chemically synthesized
gaagccgcucaaauaccu

SEQ ID NO: 3106 - RNA, 18 nt, artificial
  Chemically synthesized
ggcagccuggaaccagug

SEQ ID NO: 3107 - RNA, 18 nt, artificial
  Chemically synthesized
gucuggagggagacgugg

SEQ ID NO: 3108 - RNA, 18 nt, artificial
  Chemically synthesized
cauaguaagaaguccagc

SEQ ID NO: 3109 - RNA, 18 nt, artificial
  Chemically synthesized
cuccuguuucugcugauu

SEQ ID NO: 3110 - RNA, 18 nt, artificial
  Chemically synthesized
cagaauuccagugggagc

SEQ ID NO: 3111 - RNA, 18 nt, artificial
  Chemically synthesized
agcacuguguuuaugcug

SEQ ID NO: 3112 - RNA, 18 nt, artificial
  Chemically synthesized
guaacauuuacuccuguu

SEQ ID NO: 3113 - RNA, 18 nt, artificial
  Chemically synthesized
ugagcugcguuccagccu

SEQ ID NO: 3114 - RNA, 18 nt, artificial
  Chemically synthesized
agguggauuccuucaggu

SEQ ID NO: 3115 - RNA, 18 nt, artificial
  Chemically synthesized
uuuguuuccguuuggauu

SEQ ID NO: 3116 - RNA, 18 nt, artificial
  Chemically synthesized
aaaggaucuuugaguagg

SEQ ID NO: 3117 - RNA, 18 nt, artificial
  Chemically synthesized
ggucuggagggagacgug

SEQ ID NO: 3118 - RNA, 18 nt, artificial
  Chemically synthesized
ugagaucaagcagauaaa

SEQ ID NO: 3119 - RNA, 18 nt, artificial
  Chemically synthesized
ggaggguauccaggaauc

SEQ ID NO: 3120 - RNA, 18 nt, artificial
  Chemically synthesized
gaguugcacagcuuugcu

SEQ ID NO: 3121 - RNA, 18 nt, artificial
  Chemically synthesized
ccuucacaauaaauagug

SEQ ID NO: 3122 - RNA, 18 nt, artificial
  Chemically synthesized
cuuguuuucugcagcuuc

SEQ ID NO: 3123 - RNA, 18 nt, artificial
  Chemically synthesized
auugaguugcacagcuuu

SEQ ID NO: 3124 - RNA, 18 nt, artificial
  Chemically synthesized
ugauuuuguuuccguuug

SEQ ID NO: 3125 - RNA, 18 nt, artificial
  Chemically synthesized
cagcucucuucuccuauu

SEQ ID NO: 3126 - RNA, 18 nt, artificial
  Chemically synthesized
ggccuaccaggucccuuu

SEQ ID NO: 3127 - RNA, 18 nt, artificial
  Chemically synthesized
uguuauguucuaagcaca

SEQ ID NO: 3128 - RNA, 18 nt, artificial
  Chemically synthesized
gagccggguggcagcuga

SEQ ID NO: 3129 - RNA, 18 nt, artificial
  Chemically synthesized
ggaggaaucggugagguc

SEQ ID NO: 3130 - RNA, 18 nt, artificial
  Chemically synthesized
ccugggacacccugagca

SEQ ID NO: 3131 - RNA, 18 nt, artificial
  Chemically synthesized
ugugcauuuugcagaaac

SEQ ID NO: 3132 - RNA, 18 nt, artificial
  Chemically synthesized
cccucugccaggcacuau

SEQ ID NO: 3133 - RNA, 18 nt, artificial
  Chemically synthesized
agucugagaccuuccggu

SEQ ID NO: 3134 - RNA, 18 nt, artificial
  Chemically synthesized
caacuucugcuuguauuu

SEQ ID NO: 3135 - RNA, 18 nt, artificial
  Chemically synthesized
cagccuggaaccaguggc

SEQ ID NO: 3136 - RNA, 18 nt, artificial
  Chemically synthesized
gcuuuggugacacacuca

SEQ ID NO: 3137 - RNA, 18 nt, artificial
  Chemically synthesized
cgccugcaucaagagaag

SEQ ID NO: 3138 - RNA, 18 nt, artificial
  Chemically synthesized
cuccaaggguuucgacug

SEQ ID NO: 3139 - RNA, 18 nt, artificial
  Chemically synthesized
ugcugggaacacacaaga

SEQ ID NO: 3140 - RNA, 18 nt, artificial
  Chemically synthesized
acauuuacuccuguuucu

SEQ ID NO: 3141 - RNA, 18 nt, artificial
  Chemically synthesized
gguuucgacugguccagc

SEQ ID NO: 3142 - RNA, 18 nt, artificial
  Chemically synthesized
cagcuguaaucauuccug

SEQ ID NO: 3143 - RNA, 18 nt, artificial
  Chemically synthesized
ccaucugcacauccugag

SEQ ID NO: 3144 - RNA, 18 nt, artificial
  Chemically synthesized
caucccauggguccaaau

SEQ ID NO: 3145 - RNA, 18 nt, artificial
  Chemically synthesized
cuguuucugcugauuguu

SEQ ID NO: 3146 - RNA, 18 nt, artificial
  Chemically synthesized
guggcuuuggugacacac

SEQ ID NO: 3147 - RNA, 18 nt, artificial
  Chemically synthesized
ggcagcugacagaggaag

SEQ ID NO: 3148 - RNA, 18 nt, artificial
  Chemically synthesized
agaucuugaugacuuccc

SEQ ID NO: 3149 - RNA, 18 nt, artificial
  Chemically synthesized
ugcaagacuguguagcag

SEQ ID NO: 3150 - RNA, 18 nt, artificial
  Chemically synthesized
cagauguagugaucaggg

SEQ ID NO: 3151 - RNA, 18 nt, artificial
  Chemically synthesized
cauuuggcaucguuuaau

SEQ ID NO: 3152 - RNA, 18 nt, artificial
  Chemically synthesized
cagaaaaagcugggucuu

SEQ ID NO: 3153 - RNA, 18 nt, artificial
  Chemically synthesized
cccagaguggaacgcgug

SEQ ID NO: 3154 - RNA, 18 nt, artificial
  Chemically synthesized
accuguuaagacuccuga

SEQ ID NO: 3155 - RNA, 18 nt, artificial
  Chemically synthesized
caucacccucugugacuu

SEQ ID NO: 3156 - RNA, 18 nt, artificial
  Chemically synthesized
ggcuucgauccuugggug

SEQ ID NO: 3157 - RNA, 18 nt, artificial
  Chemically synthesized
ccuuggcaccgucacaga

SEQ ID NO: 3158 - RNA, 18 nt, artificial
  Chemically synthesized
caagagaagugacggcuc

SEQ ID NO: 3159 - RNA, 18 nt, artificial
  Chemically synthesized
agcucucuucuccuauuu

SEQ ID NO: 3160 - RNA, 18 nt, artificial
  Chemically synthesized
gcagccuggaaccagugg

SEQ ID NO: 3161 - RNA, 18 nt, artificial
  Chemically synthesized
uggacucuggaaacgaca

SEQ ID NO: 3162 - RNA, 18 nt, artificial
  Chemically synthesized
cacucacuucuuucucag

SEQ ID NO: 3163 - RNA, 18 nt, artificial
  Chemically synthesized
accgugcugagcagaaaa

SEQ ID NO: 3164 - RNA, 18 nt, artificial
  Chemically synthesized
agaaucucuuguuuccuc

SEQ ID NO: 3165 - RNA, 18 nt, artificial
  Chemically synthesized
acagcucucuucuccuau

SEQ ID NO: 3166 - RNA, 18 nt, artificial
  Chemically synthesized
uccucagaauuccagugg

SEQ ID NO: 3167 - RNA, 18 nt, artificial
  Chemically synthesized
ggcccuuguuuucugcag

SEQ ID NO: 3168 - RNA, 18 nt, artificial
  Chemically synthesized
gugggucuggagggagac

SEQ ID NO: 3169 - RNA, 18 nt, artificial
  Chemically synthesized
aucucuuguuuccuccca

SEQ ID NO: 3170 - RNA, 18 nt, artificial
  Chemically synthesized
gaaccacagguaccagau

SEQ ID NO: 3171 - RNA, 18 nt, artificial
  Chemically synthesized
gccuccaaggguuucgac

SEQ ID NO: 3172 - RNA, 18 nt, artificial
  Chemically synthesized
cagcaugaauaaaacacu

SEQ ID NO: 3173 - RNA, 18 nt, artificial
  Chemically synthesized
cacccagaagaagagccu

SEQ ID NO: 3174 - RNA, 18 nt, artificial
  Chemically synthesized
ucauaauggaccagucca

SEQ ID NO: 3175 - RNA, 18 nt, artificial
  Chemically synthesized
acaucacccucugugacu

SEQ ID NO: 3176 - RNA, 18 nt, artificial
  Chemically synthesized
ccuuccuggaaacagcau

SEQ ID NO: 3177 - RNA, 18 nt, artificial
  Chemically synthesized
agccuccaaggguuucga

SEQ ID NO: 3178 - RNA, 18 nt, artificial
  Chemically synthesized
ugacacacucacuucuuu

SEQ ID NO: 3179 - RNA, 18 nt, artificial
  Chemically synthesized
ugugggucuggagggaga

SEQ ID NO: 3180 - RNA, 18 nt, artificial
  Chemically synthesized
aggcucuccauuuggcau

SEQ ID NO: 3181 - RNA, 18 nt, artificial
  Chemically synthesized
ccaguccaugugauuuca

SEQ ID NO: 3182 - RNA, 18 nt, artificial
  Chemically synthesized
gacguggguccaaggucc

SEQ ID NO: 3183 - RNA, 18 nt, artificial
  Chemically synthesized
ggacagaaaaagcugggu

SEQ ID NO: 3184 - RNA, 18 nt, artificial
  Chemically synthesized
cuaccaggucccuuucau

SEQ ID NO: 3185 - RNA, 18 nt, artificial
  Chemically synthesized
aauccucagaauuccagu

SEQ ID NO: 3186 - RNA, 18 nt, artificial
  Chemically synthesized
cuuugaguagguucgguc

SEQ ID NO: 3187 - RNA, 18 nt, artificial
  Chemically synthesized
gccggguggcagcugaca

SEQ ID NO: 3188 - RNA, 18 nt, artificial
  Chemically synthesized
gcagaaacuuuugagggu

SEQ ID NO: 3189 - RNA, 18 nt, artificial
  Chemically synthesized
caguggcuaguucuugaa

SEQ ID NO: 3190 - RNA, 18 nt, artificial
  Chemically synthesized
gaaaugggagcgagaaac

SEQ ID NO: 3191 - RNA, 18 nt, artificial
  Chemically synthesized
gcagacugcgcaugucuc

SEQ ID NO: 3192 - RNA, 18 nt, artificial
  Chemically synthesized
uguaaucauuccugugcu

SEQ ID NO: 3193 - RNA, 18 nt, artificial
  Chemically synthesized
ugguagguauuagacuug

SEQ ID NO: 3194 - RNA, 18 nt, artificial
  Chemically synthesized
cauuuacuccuguuucug

SEQ ID NO: 3195 - RNA, 18 nt, artificial
  Chemically synthesized
augaagucugagaccuuc

SEQ ID NO: 3196 - RNA, 18 nt, artificial
  Chemically synthesized
cuugaugacuucccuuuc

SEQ ID NO: 3197 - RNA, 18 nt, artificial
  Chemically synthesized
caacaggcguuuugcaau

SEQ ID NO: 3198 - RNA, 18 nt, artificial
  Chemically synthesized
ccauaagcaggccuccaa

SEQ ID NO: 3199 - RNA, 18 nt, artificial
  Chemically synthesized
guacagugaccuaaaguu

SEQ ID NO: 3200 - RNA, 18 nt, artificial
  Chemically synthesized
gcauaguaagaaguccag

SEQ ID NO: 3201 - RNA, 18 nt, artificial
  Chemically synthesized
acacucacuucuuucuca

SEQ ID NO: 3202 - RNA, 18 nt, artificial
  Chemically synthesized
aucaagaggauccaguau

SEQ ID NO: 3203 - RNA, 18 nt, artificial
  Chemically synthesized
agugagaaggaaguggac

SEQ ID NO: 3204 - RNA, 18 nt, artificial
  Chemically synthesized
gccuaugcagguggauuc

SEQ ID NO: 3205 - RNA, 18 nt, artificial
  Chemically synthesized
caccgucacagaugccaa

SEQ ID NO: 3206 - RNA, 18 nt, artificial
  Chemically synthesized
cuuucuagggcagacugg

SEQ ID NO: 3207 - RNA, 18 nt, artificial
  Chemically synthesized
cccucccucaaagacuga

SEQ ID NO: 3208 - RNA, 18 nt, artificial
  Chemically synthesized
cuaagcauaguaagaagu

SEQ ID NO: 3209 - RNA, 18 nt, artificial
  Chemically synthesized
cagauauaccaacuucug

SEQ ID NO: 3210 - RNA, 18 nt, artificial
  Chemically synthesized
uugcagauauaccaacuu

SEQ ID NO: 3211 - RNA, 18 nt, artificial
  Chemically synthesized
gccucccucugagccuug

SEQ ID NO: 3212 - RNA, 18 nt, artificial
  Chemically synthesized
ggaaaugugcauuuugca

SEQ ID NO: 3213 - RNA, 18 nt, artificial
  Chemically synthesized
cucccaggcuuaguguuc

SEQ ID NO: 3214 - RNA, 18 nt, artificial
  Chemically synthesized
cuuuggugacacacucac

SEQ ID NO: 3215 - RNA, 18 nt, artificial
  Chemically synthesized
caucaagagaagugacgg

SEQ ID NO: 3216 - RNA, 18 nt, artificial
  Chemically synthesized
cagccaucguucugcacg

SEQ ID NO: 3217 - RNA, 18 nt, artificial
  Chemically synthesized
caaagacugacagccauc

SEQ ID NO: 3218 - RNA, 18 nt, artificial
  Chemically synthesized
agcagaaaacaaaacagg

SEQ ID NO: 3219 - RNA, 18 nt, artificial
  Chemically synthesized
gcacuuagggaucuccca

SEQ ID NO: 3220 - RNA, 18 nt, artificial
  Chemically synthesized
uggaccaguccaugugau

SEQ ID NO: 3221 - RNA, 18 nt, artificial
  Chemically synthesized
augugcauuuugcagaaa

SEQ ID NO: 3222 - RNA, 18 nt, artificial
  Chemically synthesized
uguaacauuuacuccugu

SEQ ID NO: 3223 - RNA, 18 nt, artificial
  Chemically synthesized
gcuguaaucauuccugug

SEQ ID NO: 3224 - RNA, 18 nt, artificial
  Chemically synthesized
uaaggagaaucucuuguu

SEQ ID NO: 3225 - RNA, 18 nt, artificial
  Chemically synthesized
ugacaagcagacugcgca

SEQ ID NO: 3226 - RNA, 18 nt, artificial
  Chemically synthesized
uccuguauggugauauca

SEQ ID NO: 3227 - RNA, 18 nt, artificial
  Chemically synthesized
gauaggaagaacuuucuc

SEQ ID NO: 3228 - RNA, 18 nt, artificial
  Chemically synthesized
cauuccugugcuguguuu

SEQ ID NO: 3229 - RNA, 18 nt, artificial
  Chemically synthesized
caaggucccuucccuagc

SEQ ID NO: 3230 - RNA, 18 nt, artificial
  Chemically synthesized
ccgucuuugguucuccag

SEQ ID NO: 3231 - RNA, 18 nt, artificial
  Chemically synthesized
gcuucuugccuguucugg

SEQ ID NO: 3232 - RNA, 18 nt, artificial
  Chemically synthesized
ugggcugcgagugcaaga

SEQ ID NO: 3233 - RNA, 18 nt, artificial
  Chemically synthesized
gaugggcugcgagugcaa

SEQ ID NO: 3234 - RNA, 18 nt, artificial
  Chemically synthesized
cuguucuggcaucaggca

SEQ ID NO: 3235 - RNA, 18 nt, artificial
  Chemically synthesized
ggguauccaggaaucggc

SEQ ID NO: 3236 - RNA, 18 nt, artificial
  Chemically synthesized
gcaacccuaucaagagga

SEQ ID NO: 3237 - RNA, 18 nt, artificial
  Chemically synthesized
cccaucugcacauccuga

SEQ ID NO: 3238 - RNA, 18 nt, artificial
  Chemically synthesized
uauaguuuaagaaggcuc

SEQ ID NO: 3239 - RNA, 18 nt, artificial
  Chemically synthesized
agccugaaccacagguac

SEQ ID NO: 3240 - RNA, 18 nt, artificial
  Chemically synthesized
cguugcaagacuguguag

SEQ ID NO: 3241 - RNA, 18 nt, artificial
  Chemically synthesized
cgucacagaugccaagca

SEQ ID NO: 3242 - RNA, 18 nt, artificial
  Chemically synthesized
ugagaaggaaguggacuc

SEQ ID NO: 3243 - RNA, 18 nt, artificial
  Chemically synthesized
aucccuuccuggaaacag

SEQ ID NO: 3244 - RNA, 18 nt, artificial
  Chemically synthesized
caaagcaccuguuaagac

SEQ ID NO: 3245 - RNA, 18 nt, artificial
  Chemically synthesized
aggucccuuucaucuuga

SEQ ID NO: 3246 - RNA, 18 nt, artificial
  Chemically synthesized
ccuuuuagacaugguugu

SEQ ID NO: 3247 - RNA, 18 nt, artificial
  Chemically synthesized
agccuaggaagggaagga

SEQ ID NO: 3248 - RNA, 18 nt, artificial
  Chemically synthesized
gcuuuauccgggcuugug

SEQ ID NO: 3249 - RNA, 18 nt, artificial
  Chemically synthesized
cucuucuccuauuuucau

SEQ ID NO: 3250 - RNA, 18 nt, artificial
  Chemically synthesized
cguaauuuaaagcucugu

SEQ ID NO: 3251 - RNA, 18 nt, artificial
  Chemically synthesized
ccuaaaguugguaagaug

SEQ ID NO: 3252 - RNA, 18 nt, artificial
  Chemically synthesized
cugugcuguguuuuuuau

SEQ ID NO: 3253 - RNA, 18 nt, artificial
  Chemically synthesized
acccagaguggaacgcgu

SEQ ID NO: 3254 - RNA, 18 nt, artificial
  Chemically synthesized
guucuaagcacagcucuc

SEQ ID NO: 3255 - RNA, 18 nt, artificial
  Chemically synthesized
cuguguuuuuuauuaccc

SEQ ID NO: 3256 - RNA, 18 nt, artificial
  Chemically synthesized
ggacggcaagaugcacau

SEQ ID NO: 3257 - RNA, 18 nt, artificial
  Chemically synthesized
guugauuuuguuuccguu

SEQ ID NO: 3258 - RNA, 18 nt, artificial
  Chemically synthesized
cuccuuuuagacaugguu

SEQ ID NO: 3259 - RNA, 18 nt, artificial
  Chemically synthesized
ugaugcuuuguaucauuc

SEQ ID NO: 3260 - RNA, 18 nt, artificial
  Chemically synthesized
cuuuauccgggcuugugu

SEQ ID NO: 3261 - RNA, 18 nt, artificial
  Chemically synthesized
auagaguuuaucuacacg

SEQ ID NO: 3262 - RNA, 18 nt, artificial
  Chemically synthesized
gggaucucccagcugggu

SEQ ID NO: 3263 - RNA, 18 nt, artificial
  Chemically synthesized
gugaaccugaguugcaga

SEQ ID NO: 3264 - RNA, 18 nt, artificial
  Chemically synthesized
agugccucuggauggacu

SEQ ID NO: 3265 - RNA, 18 nt, artificial
  Chemically synthesized
gaaaguugacaagcagac

SEQ ID NO: 3266 - RNA, 18 nt, artificial
  Chemically synthesized
uugcaaaaugcuuccaaa

SEQ ID NO: 3267 - RNA, 18 nt, artificial
  Chemically synthesized
guaaagauaaacugacga

SEQ ID NO: 3268 - RNA, 18 nt, artificial
  Chemically synthesized
ccaaagccaccuuagccu

SEQ ID NO: 3269 - RNA, 18 nt, artificial
  Chemically synthesized
agaaaaagcugggucuug

SEQ ID NO: 3270 - RNA, 18 nt, artificial
  Chemically synthesized
cugccguaauuuaaagcu

SEQ ID NO: 3271 - RNA, 18 nt, artificial
  Chemically synthesized
ucccuuucaucuugagag

SEQ ID NO: 3272 - RNA, 18 nt, artificial
  Chemically synthesized
gaucuugaugacuucccu

SEQ ID NO: 3273 - RNA, 18 nt, artificial
  Chemically synthesized
ucagugugguuuccugaa

SEQ ID NO: 3274 - RNA, 18 nt, artificial
  Chemically synthesized
ggagccucccucugagcc

SEQ ID NO: 3275 - RNA, 18 nt, artificial
  Chemically synthesized
ugguaagaugucauaaug

SEQ ID NO: 3276 - RNA, 18 nt, artificial
  Chemically synthesized
aagcauuugacccagagu

SEQ ID NO: 3277 - RNA, 18 nt, artificial
  Chemically synthesized
agcuaagaaacuuccuag

SEQ ID NO: 3278 - RNA, 18 nt, artificial
  Chemically synthesized
cagguuaagaagagccgg

SEQ ID NO: 3279 - RNA, 18 nt, artificial
  Chemically synthesized
gacugcgcaugucucuga

SEQ ID NO: 3280 - RNA, 18 nt, artificial
  Chemically synthesized
guagguucggucugaaag

SEQ ID NO: 3281 - RNA, 18 nt, artificial
  Chemically synthesized
ugaaaguugacaagcaga

SEQ ID NO: 3282 - RNA, 18 nt, artificial
  Chemically synthesized
aacuucugcuuguauuuc

SEQ ID NO: 3283 - RNA, 18 nt, artificial
  Chemically synthesized
gacaagcagacugcgcau

SEQ ID NO: 3284 - RNA, 18 nt, artificial
  Chemically synthesized
aagucugagaccuuccgg

SEQ ID NO: 3285 - RNA, 18 nt, artificial
  Chemically synthesized
cucugacaucccuuccug

SEQ ID NO: 3286 - RNA, 18 nt, artificial
  Chemically synthesized
guaaacauacacacgcaa

SEQ ID NO: 3287 - RNA, 18 nt, artificial
  Chemically synthesized
ccucuggauggacugggu

SEQ ID NO: 3288 - RNA, 18 nt, artificial
  Chemically synthesized
gaugacuucccuuucuag

SEQ ID NO: 3289 - RNA, 18 nt, artificial
  Chemically synthesized
ccuaccaggucccuuuca

SEQ ID NO: 3290 - RNA, 18 nt, artificial
  Chemically synthesized
caagguccucaucccauc

SEQ ID NO: 3291 - RNA, 18 nt, artificial
  Chemically synthesized
gaucuuugaguagguucg

SEQ ID NO: 3292 - RNA, 18 nt, artificial
  Chemically synthesized
agaaauauuggacuugcu

SEQ ID NO: 3293 - RNA, 18 nt, artificial
  Chemically synthesized
cugcccucaaggucccuu

SEQ ID NO: 3294 - RNA, 18 nt, artificial
  Chemically synthesized
cuagggaaccuauguguu

SEQ ID NO: 3295 - RNA, 18 nt, artificial
  Chemically synthesized
caagcaggcagcacuuag

SEQ ID NO: 3296 - RNA, 18 nt, artificial
  Chemically synthesized
cccaccgggaccugguca

SEQ ID NO: 3297 - RNA, 18 nt, artificial
  Chemically synthesized
guuucugcaucguggaag

SEQ ID NO: 3298 - RNA, 18 nt, artificial
  Chemically synthesized
gugaccuaaaguugguaa

SEQ ID NO: 3299 - RNA, 18 nt, artificial
  Chemically synthesized
ugggaacacacaagaguu

SEQ ID NO: 3300 - RNA, 18 nt, artificial
  Chemically synthesized
gaaucggugagguccugu

SEQ ID NO: 3301 - RNA, 18 nt, artificial
  Chemically synthesized
cccucccaggcuuagugu

SEQ ID NO: 3302 - RNA, 18 nt, artificial
  Chemically synthesized
cccacauccaagggcagc

SEQ ID NO: 3303 - RNA, 18 nt, artificial
  Chemically synthesized
agccucccucugagccuu

SEQ ID NO: 3304 - RNA, 18 nt, artificial
  Chemically synthesized
caugaucccgugcuacau

SEQ ID NO: 3305 - RNA, 18 nt, artificial
  Chemically synthesized
cauaauggaccaguccau

SEQ ID NO: 3306 - RNA, 18 nt, artificial
  Chemically synthesized
gucacagaugccaagcag

SEQ ID NO: 3307 - RNA, 18 nt, artificial
  Chemically synthesized
ugcaucaagagaagugac

SEQ ID NO: 3308 - RNA, 18 nt, artificial
  Chemically synthesized
gagaccuuccggugcugg

SEQ ID NO: 3309 - RNA, 18 nt, artificial
  Chemically synthesized
uaccuagcuaagaaacuu

SEQ ID NO: 3310 - RNA, 18 nt, artificial
  Chemically synthesized
gcugcguuccagccucag

SEQ ID NO: 3311 - RNA, 18 nt, artificial
  Chemically synthesized
ugguuuccugaagccagu

SEQ ID NO: 3312 - RNA, 18 nt, artificial
  Chemically synthesized
gcagauguagugaucagg

SEQ ID NO: 3313 - RNA, 18 nt, artificial
  Chemically synthesized
caccuggauugaguugca

SEQ ID NO: 3314 - RNA, 18 nt, artificial
  Chemically synthesized
uugguucuccaguucaaa

SEQ ID NO: 3315 - RNA, 18 nt, artificial
  Chemically synthesized
cuuggcaccgucacagau

SEQ ID NO: 3316 - RNA, 18 nt, artificial
  Chemically synthesized
cuuccaaagccaccuuag

SEQ ID NO: 3317 - RNA, 18 nt, artificial
  Chemically synthesized
gggccuggaaaugugcau

SEQ ID NO: 3318 - RNA, 18 nt, artificial
  Chemically synthesized
cacgcggcuucccuccca

SEQ ID NO: 3319 - RNA, 18 nt, artificial
  Chemically synthesized
caaguucuucgccugcau

SEQ ID NO: 3320 - RNA, 18 nt, artificial
  Chemically synthesized
cugaagccagugauaugg

SEQ ID NO: 3321 - RNA, 18 nt, artificial
  Chemically synthesized
uucucagccuccaggaca

SEQ ID NO: 3322 - RNA, 18 nt, artificial
  Chemically synthesized
uauuacccuugguaggua

SEQ ID NO: 3323 - RNA, 18 nt, artificial
  Chemically synthesized
aggaucuuugaguagguu

SEQ ID NO: 3324 - RNA, 18 nt, artificial
  Chemically synthesized
ggcuucccucccaguccc

SEQ ID NO: 3325 - RNA, 18 nt, artificial
  Chemically synthesized
ucucgguaaugauaagga

SEQ ID NO: 3326 - RNA, 18 nt, artificial
  Chemically synthesized
gcuugcaggaggaaucgg

SEQ ID NO: 3327 - RNA, 18 nt, artificial
  Chemically synthesized
guggucuugcaaaaugcu

SEQ ID NO: 3328 - RNA, 18 nt, artificial
  Chemically synthesized
ccucagcugagucuuuuu

SEQ ID NO: 3329 - RNA, 18 nt, artificial
  Chemically synthesized
agaagugacggcuccugu

SEQ ID NO: 3330 - RNA, 18 nt, artificial
  Chemically synthesized
cguggucuugcaaaaugc

SEQ ID NO: 3331 - RNA, 18 nt, artificial
  Chemically synthesized
accgggaccuggucagca

SEQ ID NO: 3332 - RNA, 18 nt, artificial
  Chemically synthesized
gauccacacacguugguc

SEQ ID NO: 3333 - RNA, 18 nt, artificial
  Chemically synthesized
uauauuugauccacacac

SEQ ID NO: 3334 - RNA, 18 nt, artificial
  Chemically synthesized
accuauguguucccucag

SEQ ID NO: 3335 - RNA, 18 nt, artificial
  Chemically synthesized
guuuuuuauuacccuugg

SEQ ID NO: 3336 - RNA, 18 nt, artificial
  Chemically synthesized
gaaguggacucuggaaac

SEQ ID NO: 3337 - RNA, 18 nt, artificial
  Chemically synthesized
cgcggcuucccucccagu

SEQ ID NO: 3338 - RNA, 18 nt, artificial
  Chemically synthesized
cccuaucaagaggaucca

SEQ ID NO: 3339 - RNA, 18 nt, artificial
  Chemically synthesized
cccggacgagugccucug

SEQ ID NO: 3340 - RNA, 18 nt, artificial
  Chemically synthesized
cgguugccauugcuucuu

SEQ ID NO: 3341 - RNA, 18 nt, artificial
  Chemically synthesized
gcuguguuuuuuauuacc

SEQ ID NO: 3342 - RNA, 18 nt, artificial
  Chemically synthesized
cuuccacgccucugcacu

SEQ ID NO: 3343 - RNA, 18 nt, artificial
  Chemically synthesized
ggacccauaagcaggccu

SEQ ID NO: 3344 - RNA, 18 nt, artificial
  Chemically synthesized
cuggcaagugcucccauc

SEQ ID NO: 3345 - RNA, 18 nt, artificial
  Chemically synthesized
aaagguguggccuuuaua

SEQ ID NO: 3346 - RNA, 18 nt, artificial
  Chemically synthesized
acaggcacauuauguaaa

SEQ ID NO: 3347 - RNA, 18 nt, artificial
  Chemically synthesized
acuucccuuucuagggca

SEQ ID NO: 3348 - RNA, 18 nt, artificial
  Chemically synthesized
cuguugauuuuguuuccg

SEQ ID NO: 3349 - RNA, 18 nt, artificial
  Chemically synthesized
caaagggccugagaagga

SEQ ID NO: 3350 - RNA, 18 nt, artificial
  Chemically synthesized
ccugagcaccacccagaa

SEQ ID NO: 3351 - RNA, 18 nt, artificial
  Chemically synthesized
ucuugaugacuucccuuu

SEQ ID NO: 3352 - RNA, 18 nt, artificial
  Chemically synthesized
gagugcaagaucacgcgc

SEQ ID NO: 3353 - RNA, 18 nt, artificial
  Chemically synthesized
uuguuuccguuuggauuu

SEQ ID NO: 3354 - RNA, 18 nt, artificial
  Chemically synthesized
ccucccagucccugccuu

SEQ ID NO: 3355 - RNA, 18 nt, artificial
  Chemically synthesized
aggccuaccaggucccuu

SEQ ID NO: 3356 - RNA, 18 nt, artificial
  Chemically synthesized
caagaugcacaucacccu

SEQ ID NO: 3357 - RNA, 18 nt, artificial
  Chemically synthesized
uggaggaaagaaggaaua

SEQ ID NO: 3358 - RNA, 18 nt, artificial
  Chemically synthesized
ugacaaagauuaccuagc

SEQ ID NO: 3359 - RNA, 18 nt, artificial
  Chemically synthesized
gguggcuuuggugacaca

SEQ ID NO: 3360 - RNA, 18 nt, artificial
  Chemically synthesized
ucacuucuuucucagccu

SEQ ID NO: 3361 - RNA, 18 nt, artificial
  Chemically synthesized
uaaucauuccugugcugu

SEQ ID NO: 3362 - RNA, 18 nt, artificial
  Chemically synthesized
aguagguucggucugaaa

SEQ ID NO: 3363 - RNA, 18 nt, artificial
  Chemically synthesized
cguuuugcaaugcagaug

SEQ ID NO: 3364 - RNA, 18 nt, artificial
  Chemically synthesized
gggcaccaggccaaguuc

SEQ ID NO: 3365 - RNA, 18 nt, artificial
  Chemically synthesized
acagagaagaacaucaac

SEQ ID NO: 3366 - RNA, 18 nt, artificial
  Chemically synthesized
caaaaaaagccuccaagg

SEQ ID NO: 3367 - RNA, 18 nt, artificial
  Chemically synthesized
uugguagguauuagacuu

SEQ ID NO: 3368 - RNA, 18 nt, artificial
  Chemically synthesized
gagcacuguguuuaugcu

SEQ ID NO: 3369 - RNA, 18 nt, artificial
  Chemically synthesized
uguacagugaccuaaagu

SEQ ID NO: 3370 - RNA, 18 nt, artificial
  Chemically synthesized
aagaaauauuggacuugc

SEQ ID NO: 3371 - RNA, 18 nt, artificial
  Chemically synthesized
cagaaacuuuugaggguc

SEQ ID NO: 3372 - RNA, 18 nt, artificial
  Chemically synthesized
uucccuuucuagggcaga

SEQ ID NO: 3373 - RNA, 18 nt, artificial
  Chemically synthesized
cacauccaagggcagccu

SEQ ID NO: 3374 - RNA, 18 nt, artificial
  Chemically synthesized
caucuugagagggacaug

SEQ ID NO: 3375 - RNA, 18 nt, artificial
  Chemically synthesized
ggcuuucugcaugugacg

SEQ ID NO: 3376 - RNA, 18 nt, artificial
  Chemically synthesized
uagcuaagaaacuuccua

SEQ ID NO: 3377 - RNA, 18 nt, artificial
  Chemically synthesized
acauccaagggcagccug

SEQ ID NO: 3378 - RNA, 18 nt, artificial
  Chemically synthesized
uguucccucccucaaaga

SEQ ID NO: 3379 - RNA, 18 nt, artificial
  Chemically synthesized
gucuuuuuggucugcacc

SEQ ID NO: 3380 - RNA, 18 nt, artificial
  Chemically synthesized
ccaugagcucccagcacc

SEQ ID NO: 3381 - RNA, 18 nt, artificial
  Chemically synthesized
agauguagugaucagggc

SEQ ID NO: 3382 - RNA, 18 nt, artificial
  Chemically synthesized
gagguagguggcuuuggu

SEQ ID NO: 3383 - RNA, 18 nt, artificial
  Chemically synthesized
aagccgcucaaauaccuu

SEQ ID NO: 3384 - RNA, 18 nt, artificial
  Chemically synthesized
ugagccuuguagaaaugg

SEQ ID NO: 3385 - RNA, 18 nt, artificial
  Chemically synthesized
gacgccagcuaagcauag

SEQ ID NO: 3386 - RNA, 18 nt, artificial
  Chemically synthesized
gcagcuuccacgccucug

SEQ ID NO: 3387 - RNA, 18 nt, artificial
  Chemically synthesized
agaauuccagugggagcc

SEQ ID NO: 3388 - RNA, 18 nt, artificial
  Chemically synthesized
gaacgcguggccuaugca

SEQ ID NO: 3389 - RNA, 18 nt, artificial
  Chemically synthesized
acagaaaaagcugggucu

SEQ ID NO: 3390 - RNA, 18 nt, artificial
  Chemically synthesized
aaggaauaucucauugca

SEQ ID NO: 3391 - RNA, 18 nt, artificial
  Chemically synthesized
caagaggauccaguauga

SEQ ID NO: 3392 - RNA, 18 nt, artificial
  Chemically synthesized
agcugacagaggaagccg

SEQ ID NO: 3393 - RNA, 18 nt, artificial
  Chemically synthesized
auaaaacacucaucccau

SEQ ID NO: 3394 - RNA, 18 nt, artificial
  Chemically synthesized
gaaucucuuguuuccucc

SEQ ID NO: 3395 - RNA, 18 nt, artificial
  Chemically synthesized
guuauguucuaagcacag

SEQ ID NO: 3396 - RNA, 18 nt, artificial
  Chemically synthesized
acacguuggucuuuuaac

SEQ ID NO: 3397 - RNA, 18 nt, artificial
  Chemically synthesized
ggugcacccgcaacaggc

SEQ ID NO: 3398 - RNA, 18 nt, artificial
  Chemically synthesized
ucugcaucguggaagcau

SEQ ID NO: 3399 - RNA, 18 nt, artificial
  Chemically synthesized
cugccaggcacuaugugu

SEQ ID NO: 3400 - RNA, 18 nt, artificial
  Chemically synthesized
gaagucugagaccuuccg

SEQ ID NO: 3401 - RNA, 18 nt, artificial
  Chemically synthesized
cuggucagcacagaucuu

SEQ ID NO: 3402 - RNA, 18 nt, artificial
  Chemically synthesized
gugcauuuugcagaaacu

SEQ ID NO: 3403 - RNA, 18 nt, artificial
  Chemically synthesized
ucaucuugagagggacau

SEQ ID NO: 3404 - RNA, 18 nt, artificial
  Chemically synthesized
cacuuagggaucucccag

SEQ ID NO: 3405 - RNA, 18 nt, artificial
  Chemically synthesized
cacgcaaugaaaccgaag

SEQ ID NO: 3406 - RNA, 18 nt, artificial
  Chemically synthesized
gacugacagccaucguuc

SEQ ID NO: 3407 - RNA, 18 nt, artificial
  Chemically synthesized
auugcaaaguaaaggauc

SEQ ID NO: 3408 - RNA, 18 nt, artificial
  Chemically synthesized
aguggaacgcguggccua

SEQ ID NO: 3409 - RNA, 18 nt, artificial
  Chemically synthesized
guucggucugaaaggugu

SEQ ID NO: 3410 - RNA, 18 nt, artificial
  Chemically synthesized
ugcagauguagugaucag

SEQ ID NO: 3411 - RNA, 18 nt, artificial
  Chemically synthesized
guguucccucaguguggu

SEQ ID NO: 3412 - RNA, 18 nt, artificial
  Chemically synthesized
ugccguaauuuaaagcuc

SEQ ID NO: 3413 - RNA, 18 nt, artificial
  Chemically synthesized
cugcgguugccauugcuu

SEQ ID NO: 3414 - RNA, 18 nt, artificial
  Chemically synthesized
cggcuccugugcguggua

SEQ ID NO: 3415 - RNA, 18 nt, artificial
  Chemically synthesized
ggguuucgacugguccag

SEQ ID NO: 3416 - RNA, 18 nt, artificial
  Chemically synthesized
agagaagaacaucaacgg

SEQ ID NO: 3417 - RNA, 18 nt, artificial
  Chemically synthesized
auggaccaguccauguga

SEQ ID NO: 3418 - RNA, 18 nt, artificial
  Chemically synthesized
ccgugcuacaucuccucc

SEQ ID NO: 3419 - RNA, 18 nt, artificial
  Chemically synthesized
ccaaagcaccuguuaaga

SEQ ID NO: 3420 - RNA, 18 nt, artificial
  Chemically synthesized
caacugcaaaaaaagccu

SEQ ID NO: 3421 - RNA, 18 nt, artificial
  Chemically synthesized
cuuucucagccuccagga

SEQ ID NO: 3422 - RNA, 18 nt, artificial
  Chemically synthesized
ucuaaaggugaauucuca

SEQ ID NO: 3423 - RNA, 18 nt, artificial
  Chemically synthesized
gcagacugggaggguauc

SEQ ID NO: 3424 - RNA, 18 nt, artificial
  Chemically synthesized
cuggaaccaguggcuagu

SEQ ID NO: 3425 - RNA, 18 nt, artificial
  Chemically synthesized
gacuguguagcaggccua

SEQ ID NO: 3426 - RNA, 18 nt, artificial
  Chemically synthesized
ggccaaguucuucgccug

SEQ ID NO: 3427 - RNA, 18 nt, artificial
  Chemically synthesized
guucgcuuccuguauggu

SEQ ID NO: 3428 - RNA, 18 nt, artificial
  Chemically synthesized
aauuccagugggagccuc

SEQ ID NO: 3429 - RNA, 18 nt, artificial
  Chemically synthesized
ugcaaaaugcuuccaaag

SEQ ID NO: 3430 - RNA, 18 nt, artificial
  Chemically synthesized
cuggaauaugaagucuga

SEQ ID NO: 3431 - RNA, 18 nt, artificial
  Chemically synthesized
gcugugcccucccaggcu

SEQ ID NO: 3432 - RNA, 18 nt, artificial
  Chemically synthesized
ccagaugggcugcgagug

SEQ ID NO: 3433 - RNA, 18 nt, artificial
  Chemically synthesized
gcgguugccauugcuucu

SEQ ID NO: 3434 - RNA, 18 nt, artificial
  Chemically synthesized
agcucuguugauuuuguu

SEQ ID NO: 3435 - RNA, 18 nt, artificial
  Chemically synthesized
uaucauucuugagcaauc

SEQ ID NO: 3436 - RNA, 18 nt, artificial
  Chemically synthesized
uggagggagacguggguc

SEQ ID NO: 3437 - RNA, 18 nt, artificial
  Chemically synthesized
aagaaacuuccuagggaa

SEQ ID NO: 3438 - RNA, 18 nt, artificial
  Chemically synthesized
aaagcugggucuugcugu

SEQ ID NO: 3439 - RNA, 18 nt, artificial
  Chemically synthesized
aauaugaagucugagacc

SEQ ID NO: 3440 - RNA, 18 nt, artificial
  Chemically synthesized
uuccugaagccagugaua

SEQ ID NO: 3441 - RNA, 18 nt, artificial
  Chemically synthesized
acuccuguuucugcugau

SEQ ID NO: 3442 - RNA, 18 nt, artificial
  Chemically synthesized
ccaggcuuaguguucccu

SEQ ID NO: 3443 - RNA, 18 nt, artificial
  Chemically synthesized
ccagaguggaacgcgugg

SEQ ID NO: 3444 - RNA, 18 nt, artificial
  Chemically synthesized
accaggucccuuucaucu

SEQ ID NO: 3445 - RNA, 18 nt, artificial
  Chemically synthesized
cgagugccucuggaugga

SEQ ID NO: 3446 - RNA, 18 nt, artificial
  Chemically synthesized
uauguguucccucagugu

SEQ ID NO: 3447 - RNA, 18 nt, artificial
  Chemically synthesized
guuuucaugcuguacagu

SEQ ID NO: 3448 - RNA, 18 nt, artificial
  Chemically synthesized
gacugggaggguauccag

SEQ ID NO: 3449 - RNA, 18 nt, artificial
  Chemically synthesized
gucagcacagaucuugau

SEQ ID NO: 3450 - RNA, 18 nt, artificial
  Chemically synthesized
cggccugggcguggucuu

SEQ ID NO: 3451 - RNA, 18 nt, artificial
  Chemically synthesized
cugcgagugcaagaucac

SEQ ID NO: 3452 - RNA, 18 nt, artificial
  Chemically synthesized
ugaaagguguggccuuua

SEQ ID NO: 3453 - RNA, 18 nt, artificial
  Chemically synthesized
uguucuggcaucaggcac

SEQ ID NO: 3454 - RNA, 18 nt, artificial
  Chemically synthesized
gggcuugugugcagggcc

SEQ ID NO: 3455 - RNA, 18 nt, artificial
  Chemically synthesized
ccacccagaagaagagcc

SEQ ID NO: 3456 - RNA, 18 nt, artificial
  Chemically synthesized
cagcugagcugcguucca

SEQ ID NO: 3457 - RNA, 18 nt, artificial
  Chemically synthesized
ucuggauggacuggguca

SEQ ID NO: 3458 - RNA, 18 nt, artificial
  Chemically synthesized
cccaagcaggaguuucuc

SEQ ID NO: 3459 - RNA, 18 nt, artificial
  Chemically synthesized
aagguguggccuuuauau

SEQ ID NO: 3460 - RNA, 18 nt, artificial
  Chemically synthesized
ccucccaggcuuaguguu

SEQ ID NO: 3461 - RNA, 18 nt, artificial
  Chemically synthesized
ccaacugcaaaaaaagcc

SEQ ID NO: 3462 - RNA, 18 nt, artificial
  Chemically synthesized
cuggauugaguugcacag

SEQ ID NO: 3463 - RNA, 18 nt, artificial
  Chemically synthesized
auggccuguuuuaagaga

SEQ ID NO: 3464 - RNA, 18 nt, artificial
  Chemically synthesized
uguaucauucuugagcaa

SEQ ID NO: 3465 - RNA, 18 nt, artificial
  Chemically synthesized
agaguuuaucuacacggc

SEQ ID NO: 3466 - RNA, 18 nt, artificial
  Chemically synthesized
cgggaccuggucagcaca

SEQ ID NO: 3467 - RNA, 18 nt, artificial
  Chemically synthesized
augacaaagauuaccuag

SEQ ID NO: 3468 - RNA, 18 nt, artificial
  Chemically synthesized
ugaagccagugauauggg

SEQ ID NO: 3469 - RNA, 18 nt, artificial
  Chemically synthesized
guggccuuuauauuugau

SEQ ID NO: 3470 - RNA, 18 nt, artificial
  Chemically synthesized
uaagcauaguaagaaguc

SEQ ID NO: 3471 - RNA, 18 nt, artificial
  Chemically synthesized
cugcacauccugaggaca

SEQ ID NO: 3472 - RNA, 18 nt, artificial
  Chemically synthesized
aguugacaagcagacugc

SEQ ID NO: 3473 - RNA, 18 nt, artificial
  Chemically synthesized
ugagcucccagcaccuga

SEQ ID NO: 3474 - RNA, 18 nt, artificial
  Chemically synthesized
cuguuaagacuccugacc

SEQ ID NO: 3475 - RNA, 18 nt, artificial
  Chemically synthesized
cacaucacccucugugac

SEQ ID NO: 3476 - RNA, 18 nt, artificial
  Chemically synthesized
aaaguugacaagcagacu

SEQ ID NO: 3477 - RNA, 18 nt, artificial
  Chemically synthesized
ccaaguggcaugcagccc

SEQ ID NO: 3478 - RNA, 18 nt, artificial
  Chemically synthesized
guaccagaugggcugcga

SEQ ID NO: 3479 - RNA, 18 nt, artificial
  Chemically synthesized
uguuuccguuuggauuuu

SEQ ID NO: 3480 - RNA, 18 nt, artificial
  Chemically synthesized
aucuuugaguagguucgg

SEQ ID NO: 3481 - RNA, 18 nt, artificial
  Chemically synthesized
ugaucccgugcuacaucu

SEQ ID NO: 3482 - RNA, 18 nt, artificial
  Chemically synthesized
accuggucagcacagauc

SEQ ID NO: 3483 - RNA, 18 nt, artificial
  Chemically synthesized
cacuucuuucucagccuc

SEQ ID NO: 3484 - RNA, 18 nt, artificial
  Chemically synthesized
gcugcugcgguugccauu

SEQ ID NO: 3485 - RNA, 18 nt, artificial
  Chemically synthesized
cauugcuucuugccuguu

SEQ ID NO: 3486 - RNA, 18 nt, artificial
  Chemically synthesized
cuggagggagacgugggu

SEQ ID NO: 3487 - RNA, 18 nt, artificial
  Chemically synthesized
uggugacacacucacuuc

SEQ ID NO: 3488 - RNA, 18 nt, artificial
  Chemically synthesized
ggcagggcugggacacgc

SEQ ID NO: 3489 - RNA, 18 nt, artificial
  Chemically synthesized
ugaaccacagguaccaga

SEQ ID NO: 3490 - RNA, 18 nt, artificial
  Chemically synthesized
guuaggauaggaagaacu

SEQ ID NO: 3491 - RNA, 18 nt, artificial
  Chemically synthesized
agcuuugcuuuauccggg

SEQ ID NO: 3492 - RNA, 18 nt, artificial
  Chemically synthesized
cuguccugaggcugcugu

SEQ ID NO: 3493 - RNA, 18 nt, artificial
  Chemically synthesized
auugcuucuugccuguuc

SEQ ID NO: 3494 - RNA, 18 nt, artificial
  Chemically synthesized
gagcaccacccagaagaa

SEQ ID NO: 3495 - RNA, 18 nt, artificial
  Chemically synthesized
guagugaucagggccaaa

SEQ ID NO: 3496 - RNA, 18 nt, artificial
  Chemically synthesized
ccuguuaagacuccugac

SEQ ID NO: 3497 - RNA, 18 nt, artificial
  Chemically synthesized
aggguuucgacuggucca

SEQ ID NO: 3498 - RNA, 18 nt, artificial
  Chemically synthesized
ucaucccauggguccaaa

SEQ ID NO: 3499 - RNA, 18 nt, artificial
  Chemically synthesized
gcccuuguuuucugcagc

SEQ ID NO: 3500 - RNA, 18 nt, artificial
  Chemically synthesized
guugacaagcagacugcg

SEQ ID NO: 3501 - RNA, 18 nt, artificial
  Chemically synthesized
agggaaccuauguguucc

SEQ ID NO: 3502 - RNA, 18 nt, artificial
  Chemically synthesized
cccagcuggguuagggca

SEQ ID NO: 3503 - RNA, 18 nt, artificial
  Chemically synthesized
guuggucuuuuaaccgug

SEQ ID NO: 3504 - RNA, 18 nt, artificial
  Chemically synthesized
uuauggcaacccuaucaa

SEQ ID NO: 3505 - RNA, 18 nt, artificial
  Chemically synthesized
cuaaaguugguaagaugu

SEQ ID NO: 3506 - RNA, 18 nt, artificial
  Chemically synthesized
ugaauucucagaugauag

SEQ ID NO: 3507 - RNA, 18 nt, artificial
  Chemically synthesized
ugcagguggauuccuuca

SEQ ID NO: 3508 - RNA, 18 nt, artificial
  Chemically synthesized
cugcgcaugucucugaug

SEQ ID NO: 3509 - RNA, 18 nt, artificial
  Chemically synthesized
gaagaacaucaacgggca

SEQ ID NO: 3510 - RNA, 18 nt, artificial
  Chemically synthesized
ggcgcucggccuccugcu

SEQ ID NO: 3511 - RNA, 18 nt, artificial
  Chemically synthesized
cugaggacagaaaaagcu

SEQ ID NO: 3512 - RNA, 18 nt, artificial
  Chemically synthesized
aucuugaugacuucccuu

SEQ ID NO: 3513 - RNA, 18 nt, artificial
  Chemically synthesized
uagguauuagacuugcac

SEQ ID NO: 3514 - RNA, 18 nt, artificial
  Chemically synthesized
ugaagucugagaccuucc

SEQ ID NO: 3515 - RNA, 18 nt, artificial
  Chemically synthesized
ccguaauuuaaagcucug

SEQ ID NO: 3516 - RNA, 18 nt, artificial
  Chemically synthesized
aaggcucuccauuuggca

SEQ ID NO: 3517 - RNA, 18 nt, artificial
  Chemically synthesized
uagggaaccuauguguuc

SEQ ID NO: 3518 - RNA, 18 nt, artificial
  Chemically synthesized
gcucccagcaccugacuc

SEQ ID NO: 3519 - RNA, 18 nt, artificial
  Chemically synthesized
uggauugaguugcacagc

SEQ ID NO: 3520 - RNA, 18 nt, artificial
  Chemically synthesized
cugcuggcgacgcugcuu

SEQ ID NO: 3521 - RNA, 18 nt, artificial
  Chemically synthesized
cugcguuccagccucagc

SEQ ID NO: 3522 - RNA, 18 nt, artificial
  Chemically synthesized
gugacuucaucgugcccu

SEQ ID NO: 3523 - RNA, 18 nt, artificial
  Chemically synthesized
gcccugggacacccugag

SEQ ID NO: 3524 - RNA, 18 nt, artificial
  Chemically synthesized
uauacaacuccaccagac

SEQ ID NO: 3525 - RNA, 18 nt, artificial
  Chemically synthesized
accuuccggugcugggaa

SEQ ID NO: 3526 - RNA, 18 nt, artificial
  Chemically synthesized
gcuuucugcaugugacgc

SEQ ID NO: 3527 - RNA, 18 nt, artificial
  Chemically synthesized
ccacauccaagggcagcc

SEQ ID NO: 3528 - RNA, 18 nt, artificial
  Chemically synthesized
gcagcacuuagggaucuc

SEQ ID NO: 3529 - RNA, 18 nt, artificial
  Chemically synthesized
uggguccaagguccucau

SEQ ID NO: 3530 - RNA, 18 nt, artificial
  Chemically synthesized
ucuagggcagacugggag

SEQ ID NO: 3531 - RNA, 18 nt, artificial
  Chemically synthesized
gaagggaaggauuuugga

SEQ ID NO: 3532 - RNA, 18 nt, artificial
  Chemically synthesized
gaggaaucggugaggucc

SEQ ID NO: 3533 - RNA, 18 nt, artificial
  Chemically synthesized
auuugacccagaguggaa

SEQ ID NO: 3534 - RNA, 18 nt, artificial
  Chemically synthesized
ggcgacgcugcuucgccc

SEQ ID NO: 3535 - RNA, 18 nt, artificial
  Chemically synthesized
uuagccuguucuauucag

SEQ ID NO: 3536 - RNA, 18 nt, artificial
  Chemically synthesized
agcugagcugcguuccag

SEQ ID NO: 3537 - RNA, 18 nt, artificial
  Chemically synthesized
aaguugacaagcagacug

SEQ ID NO: 3538 - RNA, 18 nt, artificial
  Chemically synthesized
agcacagaucuugaugac

SEQ ID NO: 3539 - RNA, 18 nt, artificial
  Chemically synthesized
gaggguauccaggaaucg

SEQ ID NO: 3540 - RNA, 18 nt, artificial
  Chemically synthesized
agugugguuuccugaagc

SEQ ID NO: 3541 - RNA, 18 nt, artificial
  Chemically synthesized
uccuuuuagacaugguug

SEQ ID NO: 3542 - RNA, 18 nt, artificial
  Chemically synthesized
guuuccucccaccugugu

SEQ ID NO: 3543 - RNA, 18 nt, artificial
  Chemically synthesized
cacuauggccuguuuuaa

SEQ ID NO: 3544 - RNA, 18 nt, artificial
  Chemically synthesized
ccagcuggguuagggcag

SEQ ID NO: 3545 - RNA, 18 nt, artificial
  Chemically synthesized
ugcguuccagccucagcu

SEQ ID NO: 3546 - RNA, 18 nt, artificial
  Chemically synthesized
ccagccuaggaagggaag

SEQ ID NO: 3547 - RNA, 18 nt, artificial
  Chemically synthesized
gcugggucuugcugugcc

SEQ ID NO: 3548 - RNA, 18 nt, artificial
  Chemically synthesized
guuucucgacaucgagga

SEQ ID NO: 3549 - RNA, 18 nt, artificial
  Chemically synthesized
gcugggacacgcggcuuc

SEQ ID NO: 3550 - RNA, 18 nt, artificial
  Chemically synthesized
uaccaacuucugcuugua

SEQ ID NO: 3551 - RNA, 18 nt, artificial
  Chemically synthesized
uccaagggcagccuggaa

SEQ ID NO: 3552 - RNA, 18 nt, artificial
  Chemically synthesized
caacccuaucaagaggau

SEQ ID NO: 3553 - RNA, 18 nt, artificial
  Chemically synthesized
cagcugagucuuuuuggu

SEQ ID NO: 3554 - RNA, 18 nt, artificial
  Chemically synthesized
uguuaagacuccugaccc

SEQ ID NO: 3555 - RNA, 18 nt, artificial
  Chemically synthesized
uaucaagaggauccagua

SEQ ID NO: 3556 - RNA, 18 nt, artificial
  Chemically synthesized
gcaccaggccaaguucuu

SEQ ID NO: 3557 - RNA, 18 nt, artificial
  Chemically synthesized
gggcugggacacgcggcu

SEQ ID NO: 3558 - RNA, 18 nt, artificial
  Chemically synthesized
ggucccuucccuagcugc

SEQ ID NO: 3559 - RNA, 18 nt, artificial
  Chemically synthesized
ugauaggugaaccugagu

SEQ ID NO: 3560 - RNA, 18 nt, artificial
  Chemically synthesized
auuccugugcuguguuuu

SEQ ID NO: 3561 - RNA, 18 nt, artificial
  Chemically synthesized
gaugcacaucacccucug

SEQ ID NO: 3562 - RNA, 18 nt, artificial
  Chemically synthesized
ccaggcacuaugugucug

SEQ ID NO: 3563 - RNA, 18 nt, artificial
  Chemically synthesized
gcugcuggcgacgcugcu

SEQ ID NO: 3564 - RNA, 18 nt, artificial
  Chemically synthesized
uccagugggagccucccu

SEQ ID NO: 3565 - RNA, 18 nt, artificial
  Chemically synthesized
agcucugacaucccuucc

SEQ ID NO: 3566 - RNA, 18 nt, artificial
  Chemically synthesized
acagcuuugcuuuauccg

SEQ ID NO: 3567 - RNA, 18 nt, artificial
  Chemically synthesized
gggaaccuauguguuccc

SEQ ID NO: 3568 - RNA, 18 nt, artificial
  Chemically synthesized
caggaguuucucgacauc

SEQ ID NO: 3569 - RNA, 18 nt, artificial
  Chemically synthesized
gucccuucccuagcugcu

SEQ ID NO: 3570 - RNA, 18 nt, artificial
  Chemically synthesized
agguucggucugaaaggu

SEQ ID NO: 3571 - RNA, 18 nt, artificial
  Chemically synthesized
ugacgauauacaggcaca

SEQ ID NO: 3572 - RNA, 18 nt, artificial
  Chemically synthesized
agucuuuuuggucugcac

SEQ ID NO: 3573 - RNA, 18 nt, artificial
  Chemically synthesized
cacccugagcaccaccca

SEQ ID NO: 3574 - RNA, 18 nt, artificial
  Chemically synthesized
gagaagaacaucaacggg

SEQ ID NO: 3575 - RNA, 18 nt, artificial
  Chemically synthesized
gagaagugacggcuccug

SEQ ID NO: 3576 - RNA, 18 nt, artificial
  Chemically synthesized
ugcgagugcaagaucacg

SEQ ID NO: 3577 - RNA, 18 nt, artificial
  Chemically synthesized
aaguaaaggaucuuugag

SEQ ID NO: 3578 - RNA, 18 nt, artificial
  Chemically synthesized
aggcacauuauguaaaca

SEQ ID NO: 3579 - RNA, 18 nt, artificial
  Chemically synthesized
cgcucgguccguggacaa

SEQ ID NO: 3580 - RNA, 18 nt, artificial
  Chemically synthesized
guuaagaagagccgggug

SEQ ID NO: 3581 - RNA, 18 nt, artificial
  Chemically synthesized
guggaacgcguggccuau

SEQ ID NO: 3582 - RNA, 18 nt, artificial
  Chemically synthesized
aaaguugguaagauguca

SEQ ID NO: 3583 - RNA, 18 nt, artificial
  Chemically synthesized
agcugcugcgguugccau

SEQ ID NO: 3584 - RNA, 18 nt, artificial
  Chemically synthesized
cugcaucguggaagcauu

SEQ ID NO: 3585 - RNA, 18 nt, artificial
  Chemically synthesized
uacuccuguuucugcuga

SEQ ID NO: 3586 - RNA, 18 nt, artificial
  Chemically synthesized
ccuuguagaaaugggagc

SEQ ID NO: 3587 - RNA, 18 nt, artificial
  Chemically synthesized
aaccuauguguucccuca

SEQ ID NO: 3588 - RNA, 18 nt, artificial
  Chemically synthesized
uaguuuaagaaggcucuc

SEQ ID NO: 3589 - RNA, 18 nt, artificial
  Chemically synthesized
ugcgcaugucucugaugc

SEQ ID NO: 3590 - RNA, 18 nt, artificial
  Chemically synthesized
agagaagugacggcuccu

SEQ ID NO: 3591 - RNA, 18 nt, artificial
  Chemically synthesized
caaggguuucgacugguc

SEQ ID NO: 3592 - RNA, 18 nt, artificial
  Chemically synthesized
ucuaagcacagcucucuu

SEQ ID NO: 3593 - RNA, 18 nt, artificial
  Chemically synthesized
auuugauccacacacguu

SEQ ID NO: 3594 - RNA, 18 nt, artificial
  Chemically synthesized
cuucccucccagucccug

SEQ ID NO: 3595 - RNA, 18 nt, artificial
  Chemically synthesized
aagaaggcucuccauuug

SEQ ID NO: 3596 - RNA, 18 nt, artificial
  Chemically synthesized
cggguggcagcugacaga

SEQ ID NO: 3597 - RNA, 18 nt, artificial
  Chemically synthesized
ugggagccucccucugag

SEQ ID NO: 3598 - RNA, 18 nt, artificial
  Chemically synthesized
uauaccaacuucugcuug

SEQ ID NO: 3599 - RNA, 18 nt, artificial
  Chemically synthesized
uggauggacugggucaca

SEQ ID NO: 3600 - RNA, 18 nt, artificial
  Chemically synthesized
cagaguggaacgcguggc

SEQ ID NO: 3601 - RNA, 18 nt, artificial
  Chemically synthesized
ucucuuguuuccucccac

SEQ ID NO: 3602 - RNA, 18 nt, artificial
  Chemically synthesized
caccaugagcucccagca

SEQ ID NO: 3603 - RNA, 18 nt, artificial
  Chemically synthesized
aucugcacauccugagga

SEQ ID NO: 3604 - RNA, 18 nt, artificial
  Chemically synthesized
cccuuguuuucugcagcu

SEQ ID NO: 3605 - RNA, 18 nt, artificial
  Chemically synthesized
cccuuccuggaaacagca

SEQ ID NO: 3606 - RNA, 18 nt, artificial
  Chemically synthesized
accaugagcucccagcac

SEQ ID NO: 3607 - RNA, 18 nt, artificial
  Chemically synthesized
cacacguuggucuuuuaa

SEQ ID NO: 3608 - RNA, 18 nt, artificial
  Chemically synthesized
cugagucuuuuuggucug

SEQ ID NO: 3609 - RNA, 18 nt, artificial
  Chemically synthesized
cccucccagucccugccu

SEQ ID NO: 3610 - RNA, 18 nt, artificial
  Chemically synthesized
ucagccuccaggacacua

SEQ ID NO: 3611 - RNA, 18 nt, artificial
  Chemically synthesized
ugcuuuauccgggcuugu

SEQ ID NO: 3612 - RNA, 18 nt, artificial
  Chemically synthesized
uauacugaaaucacaugg

SEQ ID NO: 3613 - RNA, 18 nt, artificial
  Chemically synthesized
uuucuacaaggcucagag

SEQ ID NO: 3614 - RNA, 18 nt, artificial
  Chemically synthesized
auucuccuuaucauuacc

SEQ ID NO: 3615 - RNA, 18 nt, artificial
  Chemically synthesized
agaaugauacaaagcauc

SEQ ID NO: 3616 - RNA, 18 nt, artificial
  Chemically synthesized
acgucucccuccagaccc

SEQ ID NO: 3617 - RNA, 18 nt, artificial
  Chemically synthesized
uugaucucauacuggauc

SEQ ID NO: 3618 - RNA, 18 nt, artificial
  Chemically synthesized
acucuauauccuucucag

SEQ ID NO: 3619 - RNA, 18 nt, artificial
  Chemically synthesized
auugcucaagaaugauac

SEQ ID NO: 3620 - RNA, 18 nt, artificial
  Chemically synthesized
ucuauauccuucucaggc

SEQ ID NO: 3621 - RNA, 18 nt, artificial
  Chemically synthesized
cuccuucaagaacuagcc

SEQ ID NO: 3622 - RNA, 18 nt, artificial
  Chemically synthesized
uguucuucucugugaccc

SEQ ID NO: 3623 - RNA, 18 nt, artificial
  Chemically synthesized
gaaccuacucaaagaucc

SEQ ID NO: 3624 - RNA, 18 nt, artificial
  Chemically synthesized
uuuccagaguccacuucc

SEQ ID NO: 3625 - RNA, 18 nt, artificial
  Chemically synthesized
uaucugcaacucagguuc

SEQ ID NO: 3626 - RNA, 18 nt, artificial
  Chemically synthesized
ggaugaggaccuuggacc

SEQ ID NO: 3627 - RNA, 18 nt, artificial
  Chemically synthesized
aaagugcaagucuaauac

SEQ ID NO: 3628 - RNA, 18 nt, artificial
  Chemically synthesized
uuuugaguugcuugcagg

SEQ ID NO: 3629 - RNA, 18 nt, artificial
  Chemically synthesized
auauuccuucuuuccucc

SEQ ID NO: 3630 - RNA, 18 nt, artificial
  Chemically synthesized
ucucagacuucauauucc

SEQ ID NO: 3631 - RNA, 18 nt, artificial
  Chemically synthesized
uucuuuccuccaacgucc

SEQ ID NO: 3632 - RNA, 18 nt, artificial
  Chemically synthesized
uccacuuccuucucacug

SEQ ID NO: 3633 - RNA, 18 nt, artificial
  Chemically synthesized
ucucauacuggauccucu

SEQ ID NO: 3634 - RNA, 18 nt, artificial
  Chemically synthesized
acuuccuucucacugacc

SEQ ID NO: 3635 - RNA, 18 nt, artificial
  Chemically synthesized
agucuaauaccuaccaag

SEQ ID NO: 3636 - RNA, 18 nt, artificial
  Chemically synthesized
uacccucccagucugccc

SEQ ID NO: 3637 - RNA, 18 nt, artificial
  Chemically synthesized
ugcuugaucucauacugg

SEQ ID NO: 3638 - RNA, 18 nt, artificial
  Chemically synthesized
caacguccagcgagaccc

SEQ ID NO: 3639 - RNA, 18 nt, artificial
  Chemically synthesized
agaaguugguauaucugc

SEQ ID NO: 3640 - RNA, 18 nt, artificial
  Chemically synthesized
gaccuuggacccacgucu

SEQ ID NO: 3641 - RNA, 18 nt, artificial
  Chemically synthesized
aagucaucaagaucugug

SEQ ID NO: 3642 - RNA, 18 nt, artificial
  Chemically synthesized
agcugugcaacucaaucc

SEQ ID NO: 3643 - RNA, 18 nt, artificial
  Chemically synthesized
ucauauuaauuuggaccc

SEQ ID NO: 3644 - RNA, 18 nt, artificial
  Chemically synthesized
aguccacuuccuucucac

SEQ ID NO: 3645 - RNA, 18 nt, artificial
  Chemically synthesized
aauagaacaggcuaaggu

SEQ ID NO: 3646 - RNA, 18 nt, artificial
  Chemically synthesized
uuguguguucccagcacc

SEQ ID NO: 3647 - RNA, 18 nt, artificial
  Chemically synthesized
aaagcaucagagacaugc

SEQ ID NO: 3648 - RNA, 18 nt, artificial
  Chemically synthesized
auauuuugaguugcuugc

SEQ ID NO: 3649 - RNA, 18 nt, artificial
  Chemically synthesized
auuuugcaagaccacgcc

SEQ ID NO: 3650 - RNA, 18 nt, artificial
  Chemically synthesized
acuggagaaccaaagacg

SEQ ID NO: 3651 - RNA, 18 nt, artificial
  Chemically synthesized
uaauuugaacuggagaac

SEQ ID NO: 3652 - RNA, 18 nt, artificial
  Chemically synthesized
ucugcuugaucucauacu

SEQ ID NO: 3653 - RNA, 18 nt, artificial
  Chemically synthesized
augucucuuaaaacaggc

SEQ ID NO: 3654 - RNA, 18 nt, artificial
  Chemically synthesized
uauauccuucucaggccc

SEQ ID NO: 3655 - RNA, 18 nt, artificial
  Chemically synthesized
uagccacugguuccaggc

SEQ ID NO: 3656 - RNA, 18 nt, artificial
  Chemically synthesized
aauacaagcagaaguugg

SEQ ID NO: 3657 - RNA, 18 nt, artificial
  Chemically synthesized
uaaugugccuguauaucg

SEQ ID NO: 3658 - RNA, 18 nt, artificial
  Chemically synthesized
aauccaccugcauaggcc

SEQ ID NO: 3659 - RNA, 18 nt, artificial
  Chemically synthesized
auuccuggauacccuccc

SEQ ID NO: 3660 - RNA, 18 nt, artificial
  Chemically synthesized
auucugaggauuaauagg

SEQ ID NO: 3661 - RNA, 18 nt, artificial
  Chemically synthesized
cuuggacccacgucuccc

SEQ ID NO: 3662 - RNA, 18 nt, artificial
  Chemically synthesized
uugugaagguauuugagc

SEQ ID NO: 3663 - RNA, 18 nt, artificial
  Chemically synthesized
augggaugaggaccuugg

SEQ ID NO: 3664 - RNA, 18 nt, artificial
  Chemically synthesized
uaggcuggacuucuuacu

SEQ ID NO: 3665 - RNA, 18 nt, artificial
  Chemically synthesized
uucucugugacccagucc

SEQ ID NO: 3666 - RNA, 18 nt, artificial
  Chemically synthesized
uucuuacuaugcuuagcu

SEQ ID NO: 3667 - RNA, 18 nt, artificial
  Chemically synthesized
ugaugucaaaaacaaacc

SEQ ID NO: 3668 - RNA, 18 nt, artificial
  Chemically synthesized
ucgaugucgagaaacucc

SEQ ID NO: 3669 - RNA, 18 nt, artificial
  Chemically synthesized
ugcagaccaaaaagacuc

SEQ ID NO: 3670 - RNA, 18 nt, artificial
  Chemically synthesized
gaaacaagagauucuccu

SEQ ID NO: 3671 - RNA, 18 nt, artificial
  Chemically synthesized
uucuccuuaucauuaccg

SEQ ID NO: 3672 - RNA, 18 nt, artificial
  Chemically synthesized
aagugcaagucuaauacc

SEQ ID NO: 3673 - RNA, 18 nt, artificial
  Chemically synthesized
cuuccuucucacugaccg

SEQ ID NO: 3674 - RNA, 18 nt, artificial
  Chemically synthesized
uuccuucucacugaccgc

SEQ ID NO: 3675 - RNA, 18 nt, artificial
  Chemically synthesized
auaucacuggcuucagga

SEQ ID NO: 3676 - RNA, 18 nt, artificial
  Chemically synthesized
ugugguucaggcucuucu

SEQ ID NO: 3677 - RNA, 18 nt, artificial
  Chemically synthesized
ugagauauuccuucuuuc

SEQ ID NO: 3678 - RNA, 18 nt, artificial
  Chemically synthesized
agagcuuuaaauuacggc

SEQ ID NO: 3679 - RNA, 18 nt, artificial
  Chemically synthesized
uacuguuuauuguccacg

SEQ ID NO: 3680 - RNA, 18 nt, artificial
  Chemically synthesized
uaucaucugagaauucac

SEQ ID NO: 3681 - RNA, 18 nt, artificial
  Chemically synthesized
acaacucuuguguguucc

SEQ ID NO: 3682 - RNA, 18 nt, artificial
  Chemically synthesized
aucucauacuggauccuc

SEQ ID NO: 3683 - RNA, 18 nt, artificial
  Chemically synthesized
aacucuauauccuucuca

SEQ ID NO: 3684 - RNA, 18 nt, artificial
  Chemically synthesized
cauuuugcaagaccacgc

SEQ ID NO: 3685 - RNA, 18 nt, artificial
  Chemically synthesized
agaugucucuuaaaacag

SEQ ID NO: 3686 - RNA, 18 nt, artificial
  Chemically synthesized
aggaaaccacacugaggg

SEQ ID NO: 3687 - RNA, 18 nt, artificial
  Chemically synthesized
uugguauaucugcaacuc

SEQ ID NO: 3688 - RNA, 18 nt, artificial
  Chemically synthesized
acucuuguguguucccag

SEQ ID NO: 3689 - RNA, 18 nt, artificial
  Chemically synthesized
agaccaaaaagacucagc

SEQ ID NO: 3690 - RNA, 18 nt, artificial
  Chemically synthesized
ucacuucucuugaugcag

SEQ ID NO: 3691 - RNA, 18 nt, artificial
  Chemically synthesized
gauauuccuucuuuccuc

SEQ ID NO: 3692 - RNA, 18 nt, artificial
  Chemically synthesized
uuuccuccaacguccagc

SEQ ID NO: 3693 - RNA, 18 nt, artificial
  Chemically synthesized
aaauauaaaggccacacc

SEQ ID NO: 3694 - RNA, 18 nt, artificial
  Chemically synthesized
aaaguuucugcaaaaugc

SEQ ID NO: 3695 - RNA, 18 nt, artificial
  Chemically synthesized
aaucacauggacuggucc

SEQ ID NO: 3696 - RNA, 18 nt, artificial
  Chemically synthesized
auagaacaggcuaaggug

SEQ ID NO: 3697 - RNA, 18 nt, artificial
  Chemically synthesized
aagagauucuccuuauca

SEQ ID NO: 3698 - RNA, 18 nt, artificial
  Chemically synthesized
uggcugucagucuuugag

SEQ ID NO: 3699 - RNA, 18 nt, artificial
  Chemically synthesized
aaacaagggccauguccc

SEQ ID NO: 3700 - RNA, 18 nt, artificial
  Chemically synthesized
gauuaauaggauugaugg

SEQ ID NO: 3701 - RNA, 18 nt, artificial
  Chemically synthesized
agaacuagccacugguuc

SEQ ID NO: 3702 - RNA, 18 nt, artificial
  Chemically synthesized
agacccacaaccaugucu

SEQ ID NO: 3703 - RNA, 18 nt, artificial
  Chemically synthesized
uggagagccuucuuaaac

SEQ ID NO: 3704 - RNA, 18 nt, artificial
  Chemically synthesized
auaucaccauacaggaag

SEQ ID NO: 3705 - RNA, 18 nt, artificial
  Chemically synthesized
ucugugcugaccaggucc

SEQ ID NO: 3706 - RNA, 18 nt, artificial
  Chemically synthesized
accuuggacccacgucuc

SEQ ID NO: 3707 - RNA, 18 nt, artificial
  Chemically synthesized
gaacuagccacugguucc

SEQ ID NO: 3708 - RNA, 18 nt, artificial
  Chemically synthesized
acugguuccaggcugccc

SEQ ID NO: 3709 - RNA, 18 nt, artificial
  Chemically synthesized
aauccaggugccugaugc

SEQ ID NO: 3710 - RNA, 18 nt, artificial
  Chemically synthesized
ucugcauugcaaaacgcc

SEQ ID NO: 3711 - RNA, 18 nt, artificial
  Chemically synthesized
uguuauauggguuggagg

SEQ ID NO: 3712 - RNA, 18 nt, artificial
  Chemically synthesized
uggaucaaauauaaaggc

SEQ ID NO: 3713 - RNA, 18 nt, artificial
  Chemically synthesized
agucaucaagaucugugc

SEQ ID NO: 3714 - RNA, 18 nt, artificial
  Chemically synthesized
ucucaagaugaaagggac

SEQ ID NO: 3715 - RNA, 18 nt, artificial
  Chemically synthesized
ucugggucaaaugcuucc

SEQ ID NO: 3716 - RNA, 18 nt, artificial
  Chemically synthesized
auacccucccagucugcc

SEQ ID NO: 3717 - RNA, 18 nt, artificial
  Chemically synthesized
ucaagaaugauacaaagc

SEQ ID NO: 3718 - RNA, 18 nt, artificial
  Chemically synthesized
uauuugagcggcuuccuc

SEQ ID NO: 3719 - RNA, 18 nt, artificial
  Chemically synthesized
augucuaaaaggagaagg

SEQ ID NO: 3720 - RNA, 18 nt, artificial
  Chemically synthesized
uuuugcaagaccacgccc

SEQ ID NO: 3721 - RNA, 18 nt, artificial
  Chemically synthesized
uuuuguuuucugcucagc

SEQ ID NO: 3722 - RNA, 18 nt, artificial
  Chemically synthesized
aaaucacauggacugguc

SEQ ID NO: 3723 - RNA, 18 nt, artificial
  Chemically synthesized
aggaaacaagagauucuc

SEQ ID NO: 3724 - RNA, 18 nt, artificial
  Chemically synthesized
uucugaggauuaauagga

SEQ ID NO: 3725 - RNA, 18 nt, artificial
  Chemically synthesized
uugauguucuucucugug

SEQ ID NO: 3726 - RNA, 18 nt, artificial
  Chemically synthesized
acuucucuugaugcaggc

SEQ ID NO: 3727 - RNA, 18 nt, artificial
  Chemically synthesized
agaagugagugugucacc

SEQ ID NO: 3728 - RNA, 18 nt, artificial
  Chemically synthesized
agauauuccuucuuuccu

SEQ ID NO: 3729 - RNA, 18 nt, artificial
  Chemically synthesized
ucuuuacaacacaggugg

SEQ ID NO: 3730 - RNA, 18 nt, artificial
  Chemically synthesized
uacugaaaucacauggac

SEQ ID NO: 3731 - RNA, 18 nt, artificial
  Chemically synthesized
ucguuuccagaguccacu

SEQ ID NO: 3732 - RNA, 18 nt, artificial
  Chemically synthesized
augauuacagcugauguc

SEQ ID NO: 3733 - RNA, 18 nt, artificial
  Chemically synthesized
ccgcugaauagaacaggc

SEQ ID NO: 3734 - RNA, 18 nt, artificial
  Chemically synthesized
ucuuuaucugcuugaucu

SEQ ID NO: 3735 - RNA, 18 nt, artificial
  Chemically synthesized
auacaaagcaucagagac

SEQ ID NO: 3736 - RNA, 18 nt, artificial
  Chemically synthesized
uucucaggcccuuugaac

SEQ ID NO: 3737 - RNA, 18 nt, artificial
  Chemically synthesized
auagguucccuaguuccc

SEQ ID NO: 3738 - RNA, 18 nt, artificial
  Chemically synthesized
agagauucuccuuaucau

SEQ ID NO: 3739 - RNA, 18 nt, artificial
  Chemically synthesized
ugaauagaacaggcuaag

SEQ ID NO: 3740 - RNA, 18 nt, artificial
  Chemically synthesized
gauucuccuuaucauuac

SEQ ID NO: 3741 - RNA, 18 nt, artificial
  Chemically synthesized
auccagaggcacucgucc

SEQ ID NO: 3742 - RNA, 18 nt, artificial
  Chemically synthesized
uugccacuauuuauugug

SEQ ID NO: 3743 - RNA, 18 nt, artificial
  Chemically synthesized
uuccuucuuuccuccaac

SEQ ID NO: 3744 - RNA, 18 nt, artificial
  Chemically synthesized
agugcaagucuaauaccu

SEQ ID NO: 3745 - RNA, 18 nt, artificial
  Chemically synthesized
uuucaacaacucuugugu

SEQ ID NO: 3746 - RNA, 18 nt, artificial
  Chemically synthesized
acugagggaacacauagg

SEQ ID NO: 3747 - RNA, 18 nt, artificial
  Chemically synthesized
aucacuacaucugcauug

SEQ ID NO: 3748 - RNA, 18 nt, artificial
  Chemically synthesized
gucucagacuucauauuc

SEQ ID NO: 3749 - RNA, 18 nt, artificial
  Chemically synthesized
agucgaaacccuuggagg

SEQ ID NO: 3750 - RNA, 18 nt, artificial
  Chemically synthesized
cuggcuucaggaaaccac

SEQ ID NO: 3751 - RNA, 18 nt, artificial
  Chemically synthesized
uugccgcugaauagaaca

SEQ ID NO: 3752 - RNA, 18 nt, artificial
  Chemically synthesized
ucagguucaccuaucauc

SEQ ID NO: 3753 - RNA, 18 nt, artificial
  Chemically synthesized
aaaagacucagcugaggc

SEQ ID NO: 3754 - RNA, 18 nt, artificial
  Chemically synthesized
ucaucugagaauucaccu

SEQ ID NO: 3755 - RNA, 18 nt, artificial
  Chemically synthesized
uuggacccacgucucccu

SEQ ID NO: 3756 - RNA, 18 nt, artificial
  Chemically synthesized
cagaguccacuuccuucu

SEQ ID NO: 3757 - RNA, 18 nt, artificial
  Chemically synthesized
gguauuugagcggcuucc

SEQ ID NO: 3758 - RNA, 18 nt, artificial
  Chemically synthesized
uuuaggucacuguacagc

SEQ ID NO: 3759 - RNA, 18 nt, artificial
  Chemically synthesized
agaaaguucuuccuaucc

SEQ ID NO: 3760 - RNA, 18 nt, artificial
  Chemically synthesized
ugucuaaaaggagaaggg

SEQ ID NO: 3761 - RNA, 18 nt, artificial
  Chemically synthesized
uagaacaggcuaaggugg

SEQ ID NO: 3762 - RNA, 18 nt, artificial
  Chemically synthesized
acccaaggaucgaagccc

SEQ ID NO: 3763 - RNA, 18 nt, artificial
  Chemically synthesized
uuugagggagggaacacu

SEQ ID NO: 3764 - RNA, 18 nt, artificial
  Chemically synthesized
ucauuaccgagaaaguuc

SEQ ID NO: 3765 - RNA, 18 nt, artificial
  Chemically synthesized
agaguccacuuccuucuc

SEQ ID NO: 3766 - RNA, 18 nt, artificial
  Chemically synthesized
ggauuaauaggauugaug

SEQ ID NO: 3767 - RNA, 18 nt, artificial
  Chemically synthesized
augucgagaaacuccugc

SEQ ID NO: 3768 - RNA, 18 nt, artificial
  Chemically synthesized
uucuuccuauccuaaccc

SEQ ID NO: 3769 - RNA, 18 nt, artificial
  Chemically synthesized
aaugauacaaagcaucag

SEQ ID NO: 3770 - RNA, 18 nt, artificial
  Chemically synthesized
aagacucagcugaggcug

SEQ ID NO: 3771 - RNA, 18 nt, artificial
  Chemically synthesized
ugucucuuaaaacaggcc

SEQ ID NO: 3772 - RNA, 18 nt, artificial
  Chemically synthesized
uuucauugcguguguaug

SEQ ID NO: 3773 - RNA, 18 nt, artificial
  Chemically synthesized
ucuucuucuggguggugc

SEQ ID NO: 3774 - RNA, 18 nt, artificial
  Chemically synthesized
ugauacaaagcaucagag

SEQ ID NO: 3775 - RNA, 18 nt, artificial
  Chemically synthesized
gucacaugcagaaagccc

SEQ ID NO: 3776 - RNA, 18 nt, artificial
  Chemically synthesized
uaaaugucguuuccagag

SEQ ID NO: 3777 - RNA, 18 nt, artificial
  Chemically synthesized
aagcugugcaacucaauc

SEQ ID NO: 3778 - RNA, 18 nt, artificial
  Chemically synthesized
cacuuccuucucacugac

SEQ ID NO: 3779 - RNA, 18 nt, artificial
  Chemically synthesized
auuccuccugcaagcugg

SEQ ID NO: 3780 - RNA, 18 nt, artificial
  Chemically synthesized
uacaggaagcgaacaggg

SEQ ID NO: 3781 - RNA, 18 nt, artificial
  Chemically synthesized
uauuaauuuggacccaug

SEQ ID NO: 3782 - RNA, 18 nt, artificial
  Chemically synthesized
gaaacaaaaucaacagag

SEQ ID NO: 3783 - RNA, 18 nt, artificial
  Chemically synthesized
uaccuccaaaauccuucc

SEQ ID NO: 3784 - RNA, 18 nt, artificial
  Chemically synthesized
cauagguucccuaguucc

SEQ ID NO: 3785 - RNA, 18 nt, artificial
  Chemically synthesized
ugugcaacucaauccagg

SEQ ID NO: 3786 - RNA, 18 nt, artificial
  Chemically synthesized
aaaugcacauuuccaggc

SEQ ID NO: 3787 - RNA, 18 nt, artificial
  Chemically synthesized
ucacugaccgcuuuggcc

SEQ ID NO: 3788 - RNA, 18 nt, artificial
  Chemically synthesized
agaaauacaagcagaagu

SEQ ID NO: 3789 - RNA, 18 nt, artificial
  Chemically synthesized
agucugcccuagaaaggg

SEQ ID NO: 3790 - RNA, 18 nt, artificial
  Chemically synthesized
agaucugugcugaccagg

SEQ ID NO: 3791 - RNA, 18 nt, artificial
  Chemically synthesized
gaugaggaccuuggaccc

SEQ ID NO: 3792 - RNA, 18 nt, artificial
  Chemically synthesized
uaugauaucaccauacag

SEQ ID NO: 3793 - RNA, 18 nt, artificial
  Chemically synthesized
auuacggcagcaagucca

SEQ ID NO: 3794 - RNA, 18 nt, artificial
  Chemically synthesized
auacaggaagcgaacagg

SEQ ID NO: 3795 - RNA, 18 nt, artificial
  Chemically synthesized
aagaagugagugugucac

SEQ ID NO: 3796 - RNA, 18 nt, artificial
  Chemically synthesized
gaccugaaggaauccacc

SEQ ID NO: 3797 - RNA, 18 nt, artificial
  Chemically synthesized
auuaauaggauugauggg

SEQ ID NO: 3798 - RNA, 18 nt, artificial
  Chemically synthesized
gcuccuucaagaacuagc

SEQ ID NO: 3799 - RNA, 18 nt, artificial
  Chemically synthesized
ugaggaccuuggacccac

SEQ ID NO: 3800 - RNA, 18 nt, artificial
  Chemically synthesized
uaagguggcuuuggaagc

SEQ ID NO: 3801 - RNA, 18 nt, artificial
  Chemically synthesized
auguucuucucugugacc

SEQ ID NO: 3802 - RNA, 18 nt, artificial
  Chemically synthesized
cgucacuucucuugaugc

SEQ ID NO: 3803 - RNA, 18 nt, artificial
  Chemically synthesized
aagcauuuugcaagacca

SEQ ID NO: 3804 - RNA, 18 nt, artificial
  Chemically synthesized
ugucgagaaacuccugcu

SEQ ID NO: 3805 - RNA, 18 nt, artificial
  Chemically synthesized
ugcuugucaacuuucaac

SEQ ID NO: 3806 - RNA, 18 nt, artificial
  Chemically synthesized
gaagcauuuugcaagacc

SEQ ID NO: 3807 - RNA, 18 nt, artificial
  Chemically synthesized
auauuccagcauaaacac

SEQ ID NO: 3808 - RNA, 18 nt, artificial
  Chemically synthesized
accuguuuuguuuucugc

SEQ ID NO: 3809 - RNA, 18 nt, artificial
  Chemically synthesized
aucuuaccaacuuuaggu

SEQ ID NO: 3810 - RNA, 18 nt, artificial
  Chemically synthesized
agacaugcgcagucugcu

SEQ ID NO: 3811 - RNA, 18 nt, artificial
  Chemically synthesized
cgcugaauagaacaggcu

SEQ ID NO: 3812 - RNA, 18 nt, artificial
  Chemically synthesized
agaucccuaagugcugcc

SEQ ID NO: 3813 - RNA, 18 nt, artificial
  Chemically synthesized
auaggguugccauaaaug

SEQ ID NO: 3814 - RNA, 18 nt, artificial
  Chemically synthesized
gaugccaaauggagagcc

SEQ ID NO: 3815 - RNA, 18 nt, artificial
  Chemically synthesized
aaacaaucagcagaaaca

SEQ ID NO: 3816 - RNA, 18 nt, artificial
  Chemically synthesized
ugaucuugcacucgcagc

SEQ ID NO: 3817 - RNA, 18 nt, artificial
  Chemically synthesized
uuaucauuaccgagaaag

SEQ ID NO: 3818 - RNA, 18 nt, artificial
  Chemically synthesized
aaaaauccaaacggaaac

SEQ ID NO: 3819 - RNA, 18 nt, artificial
  Chemically synthesized
aucuugcacucgcagccc

SEQ ID NO: 3820 - RNA, 18 nt, artificial
  Chemically synthesized
guauaucugcaacucagg

SEQ ID NO: 3821 - RNA, 18 nt, artificial
  Chemically synthesized
ucacuggcuucaggaaac

SEQ ID NO: 3822 - RNA, 18 nt, artificial
  Chemically synthesized
caccuaccuccaaaaucc

SEQ ID NO: 3823 - RNA, 18 nt, artificial
  Chemically synthesized
cuuggaggcuuuuuuugc

SEQ ID NO: 3824 - RNA, 18 nt, artificial
  Chemically synthesized
ugcaggcgaagaacuugg

SEQ ID NO: 3825 - RNA, 18 nt, artificial
  Chemically synthesized
aaaccacacugagggaac

SEQ ID NO: 3826 - RNA, 18 nt, artificial
  Chemically synthesized
gcauaaacacagugcucc

SEQ ID NO: 3827 - RNA, 18 nt, artificial
  Chemically synthesized
aaauggagagccuucuua

SEQ ID NO: 3828 - RNA, 18 nt, artificial
  Chemically synthesized
uguacagcaugaaaacgc

SEQ ID NO: 3829 - RNA, 18 nt, artificial
  Chemically synthesized
caccuuucagaccgaacc

SEQ ID NO: 3830 - RNA, 18 nt, artificial
  Chemically synthesized
uuucuuagcuagguaauc

SEQ ID NO: 3831 - RNA, 18 nt, artificial
  Chemically synthesized
ucccucucaagaugaaag

SEQ ID NO: 3832 - RNA, 18 nt, artificial
  Chemically synthesized
cugguuccaggcugcccu

SEQ ID NO: 3833 - RNA, 18 nt, artificial
  Chemically synthesized
agggaagccgcguguccc

SEQ ID NO: 3834 - RNA, 18 nt, artificial
  Chemically synthesized
aauccuucccuuccuagg

SEQ ID NO: 3835 - RNA, 18 nt, artificial
  Chemically synthesized
guuccaggcugcccuugg

SEQ ID NO: 3836 - RNA, 18 nt, artificial
  Chemically synthesized
aggucucagacuucauau

SEQ ID NO: 3837 - RNA, 18 nt, artificial
  Chemically synthesized
augucguuuccagagucc

SEQ ID NO: 3838 - RNA, 18 nt, artificial
  Chemically synthesized
cauaucacuggcuucagg

SEQ ID NO: 3839 - RNA, 18 nt, artificial
  Chemically synthesized
aauuacggcagcaagucc

SEQ ID NO: 3840 - RNA, 18 nt, artificial
  Chemically synthesized
ugaugugcaucuugccgu

SEQ ID NO: 3841 - RNA, 18 nt, artificial
  Chemically synthesized
aacuuucaacaacucuug

SEQ ID NO: 3842 - RNA, 18 nt, artificial
  Chemically synthesized
ucaagaucugugcugacc

SEQ ID NO: 3843 - RNA, 18 nt, artificial
  Chemically synthesized
uagguucccuaguucccu

SEQ ID NO: 3844 - RNA, 18 nt, artificial
  Chemically synthesized
uccagaggcacucguccg

SEQ ID NO: 3845 - RNA, 18 nt, artificial
  Chemically synthesized
caauaauuugaacuggag

SEQ ID NO: 3846 - RNA, 18 nt, artificial
  Chemically synthesized
uccagacccacaaccaug

SEQ ID NO: 3847 - RNA, 18 nt, artificial
  Chemically synthesized
ugcaacucagguucaccu

SEQ ID NO: 3848 - RNA, 18 nt, artificial
  Chemically synthesized
ucaggacaggaccucacc

SEQ ID NO: 3849 - RNA, 18 nt, artificial
  Chemically synthesized
cuucaggaaaccacacug

SEQ ID NO: 3850 - RNA, 18 nt, artificial
  Chemically synthesized
ugguucaggcucuucuuc

SEQ ID NO: 3851 - RNA, 18 nt, artificial
  Chemically synthesized
ucaccaaagccaccuacc

SEQ ID NO: 3852 - RNA, 18 nt, artificial
  Chemically synthesized
gggaagggaccuugaggg

SEQ ID NO: 3853 - RNA, 18 nt, artificial
  Chemically synthesized
uucucuugaugcaggcga

SEQ ID NO: 3854 - RNA, 18 nt, artificial
  Chemically synthesized
cacucugggucaaaugcu

SEQ ID NO: 3855 - RNA, 18 nt, artificial
  Chemically synthesized
gagggcacagcaagaccc

SEQ ID NO: 3856 - RNA, 18 nt, artificial
  Chemically synthesized
ucgccagcagcaggaggc

SEQ ID NO: 3857 - RNA, 18 nt, artificial
  Chemically synthesized
gagggaacacuaagccug

SEQ ID NO: 3858 - RNA, 18 nt, artificial
  Chemically synthesized
uucaggcucuucuucugg

SEQ ID NO: 3859 - RNA, 18 nt, artificial
  Chemically synthesized
cgcguuccacucuggguc

SEQ ID NO: 3860 - RNA, 18 nt, artificial
  Chemically synthesized
aauauaaaggccacaccu

SEQ ID NO: 3861 - RNA, 18 nt, artificial
  Chemically synthesized
agagggaggcucccacug

SEQ ID NO: 3862 - RNA, 18 nt, artificial
  Chemically synthesized
auuugaacuggagaacca

SEQ ID NO: 3863 - RNA, 18 nt, artificial
  Chemically synthesized
acccggcucuucuuaacc

SEQ ID NO: 3864 - RNA, 18 nt, artificial
  Chemically synthesized
aaacaagagauucuccuu

SEQ ID NO: 3865 - RNA, 18 nt, artificial
  Chemically synthesized
augauacaaagcaucaga

SEQ ID NO: 3866 - RNA, 18 nt, artificial
  Chemically synthesized
aagaugaaagggaccugg

SEQ ID NO: 3867 - RNA, 18 nt, artificial
  Chemically synthesized
augaagucacagagggug

SEQ ID NO: 3868 - RNA, 18 nt, artificial
  Chemically synthesized
ucuaauaccuaccaaggg

SEQ ID NO: 3869 - RNA, 18 nt, artificial
  Chemically synthesized
cacugagggaacacauag

SEQ ID NO: 3870 - RNA, 18 nt, artificial
  Chemically synthesized
uaccugugguucaggcuc

SEQ ID NO: 3871 - RNA, 18 nt, artificial
  Chemically synthesized
gcgaugggagcacuugcc

SEQ ID NO: 3872 - RNA, 18 nt, artificial
  Chemically synthesized
aggcucccacuggaauuc

SEQ ID NO: 3873 - RNA, 18 nt, artificial
  Chemically synthesized
ucacuacaucugcauugc

SEQ ID NO: 3874 - RNA, 18 nt, artificial
  Chemically synthesized
cucuauauccuucucagg

SEQ ID NO: 3875 - RNA, 18 nt, artificial
  Chemically synthesized
uauaucugcaacucaggu

SEQ ID NO: 3876 - RNA, 18 nt, artificial
  Chemically synthesized
ucuuaccaacuuuagguc

SEQ ID NO: 3877 - RNA, 18 nt, artificial
  Chemically synthesized
aacuggagaaccaaagac

SEQ ID NO: 3878 - RNA, 18 nt, artificial
  Chemically synthesized
auccuucccuuccuaggc

SEQ ID NO: 3879 - RNA, 18 nt, artificial
  Chemically synthesized
aagcaucagagacaugcg

SEQ ID NO: 3880 - RNA, 18 nt, artificial
  Chemically synthesized
ugaggauuaauaggauug

SEQ ID NO: 3881 - RNA, 18 nt, artificial
  Chemically synthesized
aaagacucagcugaggcu

SEQ ID NO: 3882 - RNA, 18 nt, artificial
  Chemically synthesized
aaacaaaaucaacagagc

SEQ ID NO: 3883 - RNA, 18 nt, artificial
  Chemically synthesized
ucagagggaggcucccac

SEQ ID NO: 3884 - RNA, 18 nt, artificial
  Chemically synthesized
aaugucguuuccagaguc

SEQ ID NO: 3885 - RNA, 18 nt, artificial
  Chemically synthesized
uggacuucuuacuaugcu

SEQ ID NO: 3886 - RNA, 18 nt, artificial
  Chemically synthesized
uuugagcggcuuccucug

SEQ ID NO: 3887 - RNA, 18 nt, artificial
  Chemically synthesized
uuaugacaucuuaccaac

SEQ ID NO: 3888 - RNA, 18 nt, artificial
  Chemically synthesized
cuugcaggaugaaaauag

SEQ ID NO: 3889 - RNA, 18 nt, artificial
  Chemically synthesized
guugguauaucugcaacu

SEQ ID NO: 3890 - RNA, 18 nt, artificial
  Chemically synthesized
gagauucuccuuaucauu

SEQ ID NO: 3891 - RNA, 18 nt, artificial
  Chemically synthesized
ggaaacaagagauucucc

SEQ ID NO: 3892 - RNA, 18 nt, artificial
  Chemically synthesized
uccauuaugacaucuuac

SEQ ID NO: 3893 - RNA, 18 nt, artificial
  Chemically synthesized
gucuaauaccuaccaagg

SEQ ID NO: 3894 - RNA, 18 nt, artificial
  Chemically synthesized
aagccgcgugucccagcc

SEQ ID NO: 3895 - RNA, 18 nt, artificial
  Chemically synthesized
cuuucaacaacucuugug

SEQ ID NO: 3896 - RNA, 18 nt, artificial
  Chemically synthesized
agucuugcaacgacccuc

SEQ ID NO: 3897 - RNA, 18 nt, artificial
  Chemically synthesized
uugccauaaaugucguuu

SEQ ID NO: 3898 - RNA, 18 nt, artificial
  Chemically synthesized
uagaaagggaagucauca

SEQ ID NO: 3899 - RNA, 18 nt, artificial
  Chemically synthesized
gggagggaacacuaagcc

SEQ ID NO: 3900 - RNA, 18 nt, artificial
  Chemically synthesized
cguugauguucuucucug

SEQ ID NO: 3901 - RNA, 18 nt, artificial
  Chemically synthesized
agacucagcugaggcugg

SEQ ID NO: 3902 - RNA, 18 nt, artificial
  Chemically synthesized
uggugcucaggguguccc

SEQ ID NO: 3903 - RNA, 18 nt, artificial
  Chemically synthesized
ggcugagaaagaagugag

SEQ ID NO: 3904 - RNA, 18 nt, artificial
  Chemically synthesized
uuuccaggaagggauguc

SEQ ID NO: 3905 - RNA, 18 nt, artificial
  Chemically synthesized
augggagcacuugccagg

SEQ ID NO: 3906 - RNA, 18 nt, artificial
  Chemically synthesized
uuucucgcucccauuucu

SEQ ID NO: 3907 - RNA, 18 nt, artificial
  Chemically synthesized
aagcuucgguuucauugc

SEQ ID NO: 3908 - RNA, 18 nt, artificial
  Chemically synthesized
acugguccauuaugacau

SEQ ID NO: 3909 - RNA, 18 nt, artificial
  Chemically synthesized
uggcuucaggaaaccaca

SEQ ID NO: 3910 - RNA, 18 nt, artificial
  Chemically synthesized
auaaugugccuguauauc

SEQ ID NO: 3911 - RNA, 18 nt, artificial
  Chemically synthesized
acccuuggaggcuuuuuu

SEQ ID NO: 3912 - RNA, 18 nt, artificial
  Chemically synthesized
cauaugauaucaccauac

SEQ ID NO: 3913 - RNA, 18 nt, artificial
  Chemically synthesized
uaaaaaacacagcacagg

SEQ ID NO: 3914 - RNA, 18 nt, artificial
  Chemically synthesized
aggcgaagaacuuggccu

SEQ ID NO: 3915 - RNA, 18 nt, artificial
  Chemically synthesized
gaaguugguauaucugca

SEQ ID NO: 3916 - RNA, 18 nt, artificial
  Chemically synthesized
caaugagauauuccuucu

SEQ ID NO: 3917 - RNA, 18 nt, artificial
  Chemically synthesized
cuaccuccaaaauccuuc

SEQ ID NO: 3918 - RNA, 18 nt, artificial
  Chemically synthesized
gacugggagggaagccgc

SEQ ID NO: 3919 - RNA, 18 nt, artificial
  Chemically synthesized
ucccacuggaauucugag

SEQ ID NO: 3920 - RNA, 18 nt, artificial
  Chemically synthesized
ucugugacccaguccauc

SEQ ID NO: 3921 - RNA, 18 nt, artificial
  Chemically synthesized
uuuccugcaaugagauau

SEQ ID NO: 3922 - RNA, 18 nt, artificial
  Chemically synthesized
uaggguugccauaaaugu

SEQ ID NO: 3923 - RNA, 18 nt, artificial
  Chemically synthesized
aauggagagccuucuuaa

SEQ ID NO: 3924 - RNA, 18 nt, artificial
  Chemically synthesized
gcuuuggaagcauuuugc

SEQ ID NO: 3925 - RNA, 18 nt, artificial
  Chemically synthesized
ugucagucuuugagggag

SEQ ID NO: 3926 - RNA, 18 nt, artificial
  Chemically synthesized
cccaguccauccagaggc

SEQ ID NO: 3927 - RNA, 18 nt, artificial
  Chemically synthesized
acgguuaaaagaccaacg

SEQ ID NO: 3928 - RNA, 18 nt, artificial
  Chemically synthesized
cugcaaugagauauuccu

SEQ ID NO: 3929 - RNA, 18 nt, artificial
  Chemically synthesized
ggccguguagauaaacuc

SEQ ID NO: 3930 - RNA, 18 nt, artificial
  Chemically synthesized
uugcuugcaggaugaaaa

SEQ ID NO: 3931 - RNA, 18 nt, artificial
  Chemically synthesized
uucucacugaccgcuuug

SEQ ID NO: 3932 - RNA, 18 nt, artificial
  Chemically synthesized
aaaacaaucagcagaaac

SEQ ID NO: 3933 - RNA, 18 nt, artificial
  Chemically synthesized
aucugagaauucaccuuu

SEQ ID NO: 3934 - RNA, 18 nt, artificial
  Chemically synthesized
guccauccagaggcacuc

SEQ ID NO: 3935 - RNA, 18 nt, artificial
  Chemically synthesized
uuagcuagguaaucuuug

SEQ ID NO: 3936 - RNA, 18 nt, artificial
  Chemically synthesized
aagggaugucagagcugg

SEQ ID NO: 3937 - RNA, 18 nt, artificial
  Chemically synthesized
uugaugcaggcgaagaac

SEQ ID NO: 3938 - RNA, 18 nt, artificial
  Chemically synthesized
guaccacgcacaggagcc

SEQ ID NO: 3939 - RNA, 18 nt, artificial
  Chemically synthesized
gacccacaaccaugucua

SEQ ID NO: 3940 - RNA, 18 nt, artificial
  Chemically synthesized
uuccuaggcuggacuucu

SEQ ID NO: 3941 - RNA, 18 nt, artificial
  Chemically synthesized
ccugcuacacagucuugc

SEQ ID NO: 3942 - RNA, 18 nt, artificial
  Chemically synthesized
aaaauaggagaagagagc

SEQ ID NO: 3943 - RNA, 18 nt, artificial
  Chemically synthesized
ggugaugugcaucuugcc

SEQ ID NO: 3944 - RNA, 18 nt, artificial
  Chemically synthesized
uuaccgagaaaguucuuc

SEQ ID NO: 3945 - RNA, 18 nt, artificial
  Chemically synthesized
ucaacuuucaacaacucu

SEQ ID NO: 3946 - RNA, 18 nt, artificial
  Chemically synthesized
ugguggaguuguauauac

SEQ ID NO: 3947 - RNA, 18 nt, artificial
  Chemically synthesized
agggagggaacacuaagc

SEQ ID NO: 3948 - RNA, 18 nt, artificial
  Chemically synthesized
aggaagggaugucagagc

SEQ ID NO: 3949 - RNA, 18 nt, artificial
  Chemically synthesized
uuaauuuggacccauggg

SEQ ID NO: 3950 - RNA, 18 nt, artificial
  Chemically synthesized
uuuuuuugcaguuggcca

SEQ ID NO: 3951 - RNA, 18 nt, artificial
  Chemically synthesized
aaacaggccauagugucc

SEQ ID NO: 3952 - RNA, 18 nt, artificial
  Chemically synthesized
uuacuaugcuuagcuggc

SEQ ID NO: 3953 - RNA, 18 nt, artificial
  Chemically synthesized
accagucgaaacccuugg

SEQ ID NO: 3954 - RNA, 18 nt, artificial
  Chemically synthesized
agagggugaugugcaucu

SEQ ID NO: 3955 - RNA, 18 nt, artificial
  Chemically synthesized
acauuuccaggcccugcc

SEQ ID NO: 3956 - RNA, 18 nt, artificial
  Chemically synthesized
gaggaugggaugaggacc

SEQ ID NO: 3957 - RNA, 18 nt, artificial
  Chemically synthesized
ggguugccauaaaugucg

SEQ ID NO: 3958 - RNA, 18 nt, artificial
  Chemically synthesized
cucccauuucuacaaggc

SEQ ID NO: 3959 - RNA, 18 nt, artificial
  Chemically synthesized
cugaaaucacauggacug

SEQ ID NO: 3960 - RNA, 18 nt, artificial
  Chemically synthesized
ccuuggacccacgucucc

SEQ ID NO: 3961 - RNA, 18 nt, artificial
  Chemically synthesized
ccggauaaagcaaagcug

SEQ ID NO: 3962 - RNA, 18 nt, artificial
  Chemically synthesized
uauuuugaguugcuugca

SEQ ID NO: 3963 - RNA, 18 nt, artificial
  Chemically synthesized
cagucugcccuagaaagg

SEQ ID NO: 3964 - RNA, 18 nt, artificial
  Chemically synthesized
aaaaugcacauuuccagg

SEQ ID NO: 3965 - RNA, 18 nt, artificial
  Chemically synthesized
ucuugauaggguugccau

SEQ ID NO: 3966 - RNA, 18 nt, artificial
  Chemically synthesized
caggcaagaagcaauggc

SEQ ID NO: 3967 - RNA, 18 nt, artificial
  Chemically synthesized
agggaacacauagguucc

SEQ ID NO: 3968 - RNA, 18 nt, artificial
  Chemically synthesized
agcagaaguugguauauc

SEQ ID NO: 3969 - RNA, 18 nt, artificial
  Chemically synthesized
cugaugucaaaaacaaac

SEQ ID NO: 3970 - RNA, 18 nt, artificial
  Chemically synthesized
auaaagcaaagcugugca

SEQ ID NO: 3971 - RNA, 18 nt, artificial
  Chemically synthesized
uugcaggaugaaaauagg

SEQ ID NO: 3972 - RNA, 18 nt, artificial
  Chemically synthesized
aggcaagaagcaauggca

SEQ ID NO: 3973 - RNA, 18 nt, artificial
  Chemically synthesized
auacaagcagaaguuggu

SEQ ID NO: 3974 - RNA, 18 nt, artificial
  Chemically synthesized
cagccucaggacaggacc

SEQ ID NO: 3975 - RNA, 18 nt, artificial
  Chemically synthesized
ugaucacuacaucugcau

SEQ ID NO: 3976 - RNA, 18 nt, artificial
  Chemically synthesized
cuucuuacuaugcuuagc

SEQ ID NO: 3977 - RNA, 18 nt, artificial
  Chemically synthesized
gucuuugagggagggaac

SEQ ID NO: 3978 - RNA, 18 nt, artificial
  Chemically synthesized
acaggaaugauuacagcu

SEQ ID NO: 3979 - RNA, 18 nt, artificial
  Chemically synthesized
uuagcuggcgucacaugc

SEQ ID NO: 3980 - RNA, 18 nt, artificial
  Chemically synthesized
gauaaagcaaagcugugc

SEQ ID NO: 3981 - RNA, 18 nt, artificial
  Chemically synthesized
aggcucagagggaggcuc

SEQ ID NO: 3982 - RNA, 18 nt, artificial
  Chemically synthesized
agaacuuggccuggugcc

SEQ ID NO: 3983 - RNA, 18 nt, artificial
  Chemically synthesized
ucaucaagaucugugcug

SEQ ID NO: 3984 - RNA, 18 nt, artificial
  Chemically synthesized
agagcugugcuuagaaca

SEQ ID NO: 3985 - RNA, 18 nt, artificial
  Chemically synthesized
uguuuuguuuucugcuca

SEQ ID NO: 3986 - RNA, 18 nt, artificial
  Chemically synthesized
caacucuuguguguuccc

SEQ ID NO: 3987 - RNA, 18 nt, artificial
  Chemically synthesized
gcugucagucuuugaggg

SEQ ID NO: 3988 - RNA, 18 nt, artificial
  Chemically synthesized
aagcugcagaaaacaagg

SEQ ID NO: 3989 - RNA, 18 nt, artificial
  Chemically synthesized
cauaaaugucguuuccag

SEQ ID NO: 3990 - RNA, 18 nt, artificial
  Chemically synthesized
gggugaugugcaucuugc

SEQ ID NO: 3991 - RNA, 18 nt, artificial
  Chemically synthesized
cucccacuggaauucuga

SEQ ID NO: 3992 - RNA, 18 nt, artificial
  Chemically synthesized
acggaaacaaaaucaaca

SEQ ID NO: 3993 - RNA, 18 nt, artificial
  Chemically synthesized
agacuucauauuccagca

SEQ ID NO: 3994 - RNA, 18 nt, artificial
  Chemically synthesized
uugucaacuuucaacaac

SEQ ID NO: 3995 - RNA, 18 nt, artificial
  Chemically synthesized
cacagucuugcaacgacc

SEQ ID NO: 3996 - RNA, 18 nt, artificial
  Chemically synthesized
ugcaagucuaauaccuac

SEQ ID NO: 3997 - RNA, 18 nt, artificial
  Chemically synthesized
cucaagaaugauacaaag

SEQ ID NO: 3998 - RNA, 18 nt, artificial
  Chemically synthesized
cauaaacacagugcuccc

SEQ ID NO: 3999 - RNA, 18 nt, artificial
  Chemically synthesized
uacaaagcaucagagaca

SEQ ID NO: 4000 - RNA, 18 nt, artificial
  Chemically synthesized
cucagcugaggcuggaac

SEQ ID NO: 4001 - RNA, 18 nt, artificial
  Chemically synthesized
guucuuccuauccuaacc

SEQ ID NO: 4002 - RNA, 18 nt, artificial
  Chemically synthesized
ucugguggaguuguauau

SEQ ID NO: 4003 - RNA, 18 nt, artificial
  Chemically synthesized
auuucuacaaggcucaga

SEQ ID NO: 4004 - RNA, 18 nt, artificial
  Chemically synthesized
cucaggacaggaccucac

SEQ ID NO: 4005 - RNA, 18 nt, artificial
  Chemically synthesized
cucugucagcugccaccc

SEQ ID NO: 4006 - RNA, 18 nt, artificial
  Chemically synthesized
acaugcgcagucugcuug

SEQ ID NO: 4007 - RNA, 18 nt, artificial
  Chemically synthesized
uacaaggcucagagggag

SEQ ID NO: 4008 - RNA, 18 nt, artificial
  Chemically synthesized
ccaaagccaccuaccucc

SEQ ID NO: 4009 - RNA, 18 nt, artificial
  Chemically synthesized
cuguuuuguuuucugcuc

SEQ ID NO: 4010 - RNA, 18 nt, artificial
  Chemically synthesized
ccaaauggagagccuucu

SEQ ID NO: 4011 - RNA, 18 nt, artificial
  Chemically synthesized
aaggucucagacuucaua

SEQ ID NO: 4012 - RNA, 18 nt, artificial
  Chemically synthesized
gaaacaggaguaaauguu

SEQ ID NO: 4013 - RNA, 18 nt, artificial
  Chemically synthesized
cauccagaggcacucguc

SEQ ID NO: 4014 - RNA, 18 nt, artificial
  Chemically synthesized
uucuucucugugacccag

SEQ ID NO: 4015 - RNA, 18 nt, artificial
  Chemically synthesized
aaauccuucccuuccuag

SEQ ID NO: 4016 - RNA, 18 nt, artificial
  Chemically synthesized
ggacugggagggaagccg

SEQ ID NO: 4017 - RNA, 18 nt, artificial
  Chemically synthesized
gagggaggcucccacugg

SEQ ID NO: 4018 - RNA, 18 nt, artificial
  Chemically synthesized
cucgaugucgagaaacuc

SEQ ID NO: 4019 - RNA, 18 nt, artificial
  Chemically synthesized
cugccacccggcucuucu

SEQ ID NO: 4020 - RNA, 18 nt, artificial
  Chemically synthesized
aaugauuacagcugaugu

SEQ ID NO: 4021 - RNA, 18 nt, artificial
  Chemically synthesized
guucaccuaucaucugag

SEQ ID NO: 4022 - RNA, 18 nt, artificial
  Chemically synthesized
cugaaggaauccaccugc

SEQ ID NO: 4023 - RNA, 18 nt, artificial
  Chemically synthesized
agcaucagagacaugcgc

SEQ ID NO: 4024 - RNA, 18 nt, artificial
  Chemically synthesized
guggaguuguauauacug

SEQ ID NO: 4025 - RNA, 18 nt, artificial
  Chemically synthesized
agcgauugcucaagaaug

SEQ ID NO: 4026 - RNA, 18 nt, artificial
  Chemically synthesized
cacacacugccgaggagg

SEQ ID NO: 4027 - RNA, 18 nt, artificial
  Chemically synthesized
caaucagcagaaacagga

SEQ ID NO: 4028 - RNA, 18 nt, artificial
  Chemically synthesized
acacacugccgaggaggg

SEQ ID NO: 4029 - RNA, 18 nt, artificial
  Chemically synthesized
uaauaccuaccaagggua

SEQ ID NO: 4030 - RNA, 18 nt, artificial
  Chemically synthesized
uaucaccauacaggaagc

SEQ ID NO: 4031 - RNA, 18 nt, artificial
  Chemically synthesized
aaaacaagggccaugucc

SEQ ID NO: 4032 - RNA, 18 nt, artificial
  Chemically synthesized
ugaguguuuuauucaugc

SEQ ID NO: 4033 - RNA, 18 nt, artificial
  Chemically synthesized
acaaucagcagaaacagg

SEQ ID NO: 4034 - RNA, 18 nt, artificial
  Chemically synthesized
ucacagagggugaugugc

SEQ ID NO: 4035 - RNA, 18 nt, artificial
  Chemically synthesized
ugaagguauuugagcggc

SEQ ID NO: 4036 - RNA, 18 nt, artificial
  Chemically synthesized
uugcaaaacgccuguugc

SEQ ID NO: 4037 - RNA, 18 nt, artificial
  Chemically synthesized
ugugcaucuugccguccc

SEQ ID NO: 4038 - RNA, 18 nt, artificial
  Chemically synthesized
agacacauagugccuggc

SEQ ID NO: 4039 - RNA, 18 nt, artificial
  Chemically synthesized
gaaagaagugaguguguc

SEQ ID NO: 4040 - RNA, 18 nt, artificial
  Chemically synthesized
agcaccggaaggucucag

SEQ ID NO: 4041 - RNA, 18 nt, artificial
  Chemically synthesized
guucaggcucuucuucug

SEQ ID NO: 4042 - RNA, 18 nt, artificial
  Chemically synthesized
aacucagguucaccuauc

SEQ ID NO: 4043 - RNA, 18 nt, artificial
  Chemically synthesized
guugccgcugaauagaac

SEQ ID NO: 4044 - RNA, 18 nt, artificial
  Chemically synthesized
uggauacccucccagucu

SEQ ID NO: 4045 - RNA, 18 nt, artificial
  Chemically synthesized
cuuuuuuugcaguuggcc

SEQ ID NO: 4046 - RNA, 18 nt, artificial
  Chemically synthesized
gaucaaauauaaaggcca

SEQ ID NO: 4047 - RNA, 18 nt, artificial
  Chemically synthesized
cucuuguguguucccagc

SEQ ID NO: 4048 - RNA, 18 nt, artificial
  Chemically synthesized
ugggucaaaugcuuccac

SEQ ID NO: 4049 - RNA, 18 nt, artificial
  Chemically synthesized
uguagcacgggaucaugg

SEQ ID NO: 4050 - RNA, 18 nt, artificial
  Chemically synthesized
aucccuaagugcugccug

SEQ ID NO: 4051 - RNA, 18 nt, artificial
  Chemically synthesized
aaagauccuuuacuuugc

SEQ ID NO: 4052 - RNA, 18 nt, artificial
  Chemically synthesized
auacuguuuauuguccac

SEQ ID NO: 4053 - RNA, 18 nt, artificial
  Chemically synthesized
uuggaggcuuuuuuugca

SEQ ID NO: 4054 - RNA, 18 nt, artificial
  Chemically synthesized
ucgagaaacuccugcuug

SEQ ID NO: 4055 - RNA, 18 nt, artificial
  Chemically synthesized
ucagcugaggcuggaacg

SEQ ID NO: 4056 - RNA, 18 nt, artificial
  Chemically synthesized
uuuauuguccacggaccg

SEQ ID NO: 4057 - RNA, 18 nt, artificial
  Chemically synthesized
aaaguucuuccuauccua

SEQ ID NO: 4058 - RNA, 18 nt, artificial
  Chemically synthesized
gaccaaaaagacucagcu

SEQ ID NO: 4059 - RNA, 18 nt, artificial
  Chemically synthesized
agugugucaccaaagcca

SEQ ID NO: 4060 - RNA, 18 nt, artificial
  Chemically synthesized
uugagggcagccaccggc

SEQ ID NO: 4061 - RNA, 18 nt, artificial
  Chemically synthesized
cuagccacugguuccagg

SEQ ID NO: 4062 - RNA, 18 nt, artificial
  Chemically synthesized
ccugaugccagaacaggc

SEQ ID NO: 4063 - RNA, 18 nt, artificial
  Chemically synthesized
gacccagcuuuuucuguc

SEQ ID NO: 4064 - RNA, 18 nt, artificial
  Chemically synthesized
auaguguccuggaggcug

SEQ ID NO: 4065 - RNA, 18 nt, artificial
  Chemically synthesized
cucugggucaaaugcuuc

SEQ ID NO: 4066 - RNA, 18 nt, artificial
  Chemically synthesized
auccaggugccugaugcc

SEQ ID NO: 4067 - RNA, 18 nt, artificial
  Chemically synthesized
gaaaguucuuccuauccu

SEQ ID NO: 4068 - RNA, 18 nt, artificial
  Chemically synthesized
agcgcgugaucuugcacu

SEQ ID NO: 4069 - RNA, 18 nt, artificial
  Chemically synthesized
ugcacccaaggaucgaag

SEQ ID NO: 4070 - RNA, 18 nt, artificial
  Chemically synthesized
uacucaaagauccuuuac

SEQ ID NO: 4071 - RNA, 18 nt, artificial
  Chemically synthesized
acucaauccaggugccug

SEQ ID NO: 4072 - RNA, 18 nt, artificial
  Chemically synthesized
acaagagauucuccuuau

SEQ ID NO: 4073 - RNA, 18 nt, artificial
  Chemically synthesized
agucuuugagggagggaa

SEQ ID NO: 4074 - RNA, 18 nt, artificial
  Chemically synthesized
auaaaugucguuuccaga

SEQ ID NO: 4075 - RNA, 18 nt, artificial
  Chemically synthesized
cuaggcuggacuucuuac

SEQ ID NO: 4076 - RNA, 18 nt, artificial
  Chemically synthesized
ucuucuuaaccuguuuug

SEQ ID NO: 4077 - RNA, 18 nt, artificial
  Chemically synthesized
caagaagcaauggcaacc

SEQ ID NO: 4078 - RNA, 18 nt, artificial
  Chemically synthesized
aggaugggaugaggaccu

SEQ ID NO: 4079 - RNA, 18 nt, artificial
  Chemically synthesized
uguuuauuguccacggac

SEQ ID NO: 4080 - RNA, 18 nt, artificial
  Chemically synthesized
uauuccagcauaaacaca

SEQ ID NO: 4081 - RNA, 18 nt, artificial
  Chemically synthesized
uacagcaugaaaacgccc

SEQ ID NO: 4082 - RNA, 18 nt, artificial
  Chemically synthesized
caacucaauccaggugcc

SEQ ID NO: 4083 - RNA, 18 nt, artificial
  Chemically synthesized
gcacaggaaugauuacag

SEQ ID NO: 4084 - RNA, 18 nt, artificial
  Chemically synthesized
aaugcacauuuccaggcc

SEQ ID NO: 4085 - RNA, 18 nt, artificial
  Chemically synthesized
acagucuugcaacgaccc

SEQ ID NO: 4086 - RNA, 18 nt, artificial
  Chemically synthesized
ugcauugcaaaacgccug

SEQ ID NO: 4087 - RNA, 18 nt, artificial
  Chemically synthesized
ccgauuccuggauacccu

SEQ ID NO: 4088 - RNA, 18 nt, artificial
  Chemically synthesized
caaaaugcacauuuccag

SEQ ID NO: 4089 - RNA, 18 nt, artificial
  Chemically synthesized
accuugagggcagccacc

SEQ ID NO: 4090 - RNA, 18 nt, artificial
  Chemically synthesized
ggaugucagagcuggacc

SEQ ID NO: 4091 - RNA, 18 nt, artificial
  Chemically synthesized
agaccacgcccaggccgc

SEQ ID NO: 4092 - RNA, 18 nt, artificial
  Chemically synthesized
aaguuucugcaaaaugca

SEQ ID NO: 4093 - RNA, 18 nt, artificial
  Chemically synthesized
ucagcacgguuaaaagac

SEQ ID NO: 4094 - RNA, 18 nt, artificial
  Chemically synthesized
uagggaagggaccuugag

SEQ ID NO: 4095 - RNA, 18 nt, artificial
  Chemically synthesized
cuugaucucauacuggau

SEQ ID NO: 4096 - RNA, 18 nt, artificial
  Chemically synthesized
aggccacaccuuucagac

SEQ ID NO: 4097 - RNA, 18 nt, artificial
  Chemically synthesized
cuucuuuccuccaacguc

SEQ ID NO: 4098 - RNA, 18 nt, artificial
  Chemically synthesized
caggugggaggaaacaag

SEQ ID NO: 4099 - RNA, 18 nt, artificial
  Chemically synthesized
aucugugcugaccagguc

SEQ ID NO: 4100 - RNA, 18 nt, artificial
  Chemically synthesized
aguugguauaucugcaac

SEQ ID NO: 4101 - RNA, 18 nt, artificial
  Chemically synthesized
aaagaccaacgugugugg

SEQ ID NO: 4102 - RNA, 18 nt, artificial
  Chemically synthesized
cgaugaagucacagaggg

SEQ ID NO: 4103 - RNA, 18 nt, artificial
  Chemically synthesized
ugccugcacccaaggauc

SEQ ID NO: 4104 - RNA, 18 nt, artificial
  Chemically synthesized
caagcuucgguuucauug

SEQ ID NO: 4105 - RNA, 18 nt, artificial
  Chemically synthesized
ucccauuucuacaaggcu

SEQ ID NO: 4106 - RNA, 18 nt, artificial
  Chemically synthesized
cauacaggaagcgaacag

SEQ ID NO: 4107 - RNA, 18 nt, artificial
  Chemically synthesized
cacacugagggaacacau

SEQ ID NO: 4108 - RNA, 18 nt, artificial
  Chemically synthesized
uaagugcugccugcuugg

SEQ ID NO: 4109 - RNA, 18 nt, artificial
  Chemically synthesized
gcgugaucuugcacucgc

SEQ ID NO: 4110 - RNA, 18 nt, artificial
  Chemically synthesized
agagccuucuuaaacuau

SEQ ID NO: 4111 - RNA, 18 nt, artificial
  Chemically synthesized
agagacaugcgcagucug

SEQ ID NO: 4112 - RNA, 18 nt, artificial
  Chemically synthesized
gaugucucuuaaaacagg

SEQ ID NO: 4113 - RNA, 18 nt, artificial
  Chemically synthesized
uggaguuguauauacuga

SEQ ID NO: 4114 - RNA, 18 nt, artificial
  Chemically synthesized
gugaugugcaucuugccg

SEQ ID NO: 4115 - RNA, 18 nt, artificial
  Chemically synthesized
gaaugauuacagcugaug

SEQ ID NO: 4116 - RNA, 18 nt, artificial
  Chemically synthesized
aggagucuuaacaggugc

SEQ ID NO: 4117 - RNA, 18 nt, artificial
  Chemically synthesized
caccggaaggucucagac

SEQ ID NO: 4118 - RNA, 18 nt, artificial
  Chemically synthesized
uggaggcugagaaagaag

SEQ ID NO: 4119 - RNA, 18 nt, artificial
  Chemically synthesized
caagagauucuccuuauc

SEQ ID NO: 4120 - RNA, 18 nt, artificial
  Chemically synthesized
gcagaaguugguauaucu

SEQ ID NO: 4121 - RNA, 18 nt, artificial
  Chemically synthesized
aggaauccaccugcauag

SEQ ID NO: 4122 - RNA, 18 nt, artificial
  Chemically synthesized
guauuugagcggcuuccu

SEQ ID NO: 4123 - RNA, 18 nt, artificial
  Chemically synthesized
gggaggagauguagcacg

SEQ ID NO: 4124 - RNA, 18 nt, artificial
  Chemically synthesized
gaugcagaaaccuuuuuu

SEQ ID NO: 4125 - RNA, 18 nt, artificial
  Chemically synthesized
gagggaagccgcgugucc

SEQ ID NO: 4126 - RNA, 18 nt, artificial
  Chemically synthesized
ccguguagauaaacucua

SEQ ID NO: 4127 - RNA, 18 nt, artificial
  Chemically synthesized
auggcugucagucuuuga

SEQ ID NO: 4128 - RNA, 18 nt, artificial
  Chemically synthesized
ugauuacagcugauguca

SEQ ID NO: 4129 - RNA, 18 nt, artificial
  Chemically synthesized
aagcaaagcugugcaacu

SEQ ID NO: 4130 - RNA, 18 nt, artificial
  Chemically synthesized
cuucaagaacuagccacu

SEQ ID NO: 4131 - RNA, 18 nt, artificial
  Chemically synthesized
cucuugauaggguugcca

SEQ ID NO: 4132 - RNA, 18 nt, artificial
  Chemically synthesized
gaccuugagggcagccac

SEQ ID NO: 4133 - RNA, 18 nt, artificial
  Chemically synthesized
aucugcauugcaaaacgc

SEQ ID NO: 4134 - RNA, 18 nt, artificial
  Chemically synthesized
aucuuuaucugcuugauc

SEQ ID NO: 4135 - RNA, 18 nt, artificial
  Chemically synthesized
ucccuaagugcugccugc

SEQ ID NO: 4136 - RNA, 18 nt, artificial
  Chemically synthesized
guguuauauggguuggag

SEQ ID NO: 4137 - RNA, 18 nt, artificial
  Chemically synthesized
acauagguucccuaguuc

SEQ ID NO: 4138 - RNA, 18 nt, artificial
  Chemically synthesized
augugccuguauaucguc

SEQ ID NO: 4139 - RNA, 18 nt, artificial
  Chemically synthesized
cagcaaguccaauauuuc

SEQ ID NO: 4140 - RNA, 18 nt, artificial
  Chemically synthesized
agguauuugagcggcuuc

SEQ ID NO: 4141 - RNA, 18 nt, artificial
  Chemically synthesized
cacugguuccaggcugcc

SEQ ID NO: 4142 - RNA, 18 nt, artificial
  Chemically synthesized
ccacgucucccuccagac

SEQ ID NO: 4143 - RNA, 18 nt, artificial
  Chemically synthesized
gcuggacuucuuacuaug

SEQ ID NO: 4144 - RNA, 18 nt, artificial
  Chemically synthesized
aaucagcagaaacaggag

SEQ ID NO: 4145 - RNA, 18 nt, artificial
  Chemically synthesized
gcucccacuggaauucug

SEQ ID NO: 4146 - RNA, 18 nt, artificial
  Chemically synthesized
cagcauaaacacagugcu

SEQ ID NO: 4147 - RNA, 18 nt, artificial
  Chemically synthesized
aacaggaguaaauguuac

SEQ ID NO: 4148 - RNA, 18 nt, artificial
  Chemically synthesized
aggcuggaacgcagcuca

SEQ ID NO: 4149 - RNA, 18 nt, artificial
  Chemically synthesized
accugaaggaauccaccu

SEQ ID NO: 4150 - RNA, 18 nt, artificial
  Chemically synthesized
aauccaaacggaaacaaa

SEQ ID NO: 4151 - RNA, 18 nt, artificial
  Chemically synthesized
ccuacucaaagauccuuu

SEQ ID NO: 4152 - RNA, 18 nt, artificial
  Chemically synthesized
cacgucucccuccagacc

SEQ ID NO: 4153 - RNA, 18 nt, artificial
  Chemically synthesized
uuuaucugcuugaucuca

SEQ ID NO: 4154 - RNA, 18 nt, artificial
  Chemically synthesized
gauuccuggauacccucc

SEQ ID NO: 4155 - RNA, 18 nt, artificial
  Chemically synthesized
agcaaagcugugcaacuc

SEQ ID NO: 4156 - RNA, 18 nt, artificial
  Chemically synthesized
cacuauuuauugugaagg

SEQ ID NO: 4157 - RNA, 18 nt, artificial
  Chemically synthesized
gaagcugcagaaaacaag

SEQ ID NO: 4158 - RNA, 18 nt, artificial
  Chemically synthesized
aaagcugugcaacucaau

SEQ ID NO: 4159 - RNA, 18 nt, artificial
  Chemically synthesized
caaacggaaacaaaauca

SEQ ID NO: 4160 - RNA, 18 nt, artificial
  Chemically synthesized
aauaggagaagagagcug

SEQ ID NO: 4161 - RNA, 18 nt, artificial
  Chemically synthesized
aaagggaccugguaggcc

SEQ ID NO: 4162 - RNA, 18 nt, artificial
  Chemically synthesized
ugugcuuagaacauaaca

SEQ ID NO: 4163 - RNA, 18 nt, artificial
  Chemically synthesized
ucagcugccacccggcuc

SEQ ID NO: 4164 - RNA, 18 nt, artificial
  Chemically synthesized
gaccucaccgauuccucc

SEQ ID NO: 4165 - RNA, 18 nt, artificial
  Chemically synthesized
ugcucagggugucccagg

SEQ ID NO: 4166 - RNA, 18 nt, artificial
  Chemically synthesized
guuucugcaaaaugcaca

SEQ ID NO: 4167 - RNA, 18 nt, artificial
  Chemically synthesized
auagugccuggcagaggg

SEQ ID NO: 4168 - RNA, 18 nt, artificial
  Chemically synthesized
accggaaggucucagacu

SEQ ID NO: 4169 - RNA, 18 nt, artificial
  Chemically synthesized
aaauacaagcagaaguug

SEQ ID NO: 4170 - RNA, 18 nt, artificial
  Chemically synthesized
gccacugguuccaggcug

SEQ ID NO: 4171 - RNA, 18 nt, artificial
  Chemically synthesized
ugagugugucaccaaagc

SEQ ID NO: 4172 - RNA, 18 nt, artificial
  Chemically synthesized
cuucucuugaugcaggcg

SEQ ID NO: 4173 - RNA, 18 nt, artificial
  Chemically synthesized
cagucgaaacccuuggag

SEQ ID NO: 4174 - RNA, 18 nt, artificial
  Chemically synthesized
ucuuguguguucccagca

SEQ ID NO: 4175 - RNA, 18 nt, artificial
  Chemically synthesized
agaaacaggaguaaaugu

SEQ ID NO: 4176 - RNA, 18 nt, artificial
  Chemically synthesized
gcuggaccagucgaaacc

SEQ ID NO: 4177 - RNA, 18 nt, artificial
  Chemically synthesized
caggaaugauuacagcug

SEQ ID NO: 4178 - RNA, 18 nt, artificial
  Chemically synthesized
cucaggaugugcagaugg

SEQ ID NO: 4179 - RNA, 18 nt, artificial
  Chemically synthesized
auuuggacccaugggaug

SEQ ID NO: 4180 - RNA, 18 nt, artificial
  Chemically synthesized
aacaaucagcagaaacag

SEQ ID NO: 4181 - RNA, 18 nt, artificial
  Chemically synthesized
gugugucaccaaagccac

SEQ ID NO: 4182 - RNA, 18 nt, artificial
  Chemically synthesized
cuuccucugucagcugcc

SEQ ID NO: 4183 - RNA, 18 nt, artificial
  Chemically synthesized
gggaagucaucaagaucu

SEQ ID NO: 4184 - RNA, 18 nt, artificial
  Chemically synthesized
cugcuacacagucuugca

SEQ ID NO: 4185 - RNA, 18 nt, artificial
  Chemically synthesized
cccugaucacuacaucug

SEQ ID NO: 4186 - RNA, 18 nt, artificial
  Chemically synthesized
auuaaacgaugccaaaug

SEQ ID NO: 4187 - RNA, 18 nt, artificial
  Chemically synthesized
aagacccagcuuuuucug

SEQ ID NO: 4188 - RNA, 18 nt, artificial
  Chemically synthesized
cacgcguuccacucuggg

SEQ ID NO: 4189 - RNA, 18 nt, artificial
  Chemically synthesized
ucaggagucuuaacaggu

SEQ ID NO: 4190 - RNA, 18 nt, artificial
  Chemically synthesized
aagucacagagggugaug

SEQ ID NO: 4191 - RNA, 18 nt, artificial
  Chemically synthesized
cacccaaggaucgaagcc

SEQ ID NO: 4192 - RNA, 18 nt, artificial
  Chemically synthesized
ucugugacggugccaagg

SEQ ID NO: 4193 - RNA, 18 nt, artificial
  Chemically synthesized
gagccgucacuucucuug

SEQ ID NO: 4194 - RNA, 18 nt, artificial
  Chemically synthesized
aaauaggagaagagagcu

SEQ ID NO: 4195 - RNA, 18 nt, artificial
  Chemically synthesized
ccacugguuccaggcugc

SEQ ID NO: 4196 - RNA, 18 nt, artificial
  Chemically synthesized
ugucguuuccagagucca

SEQ ID NO: 4197 - RNA, 18 nt, artificial
  Chemically synthesized
cugagaaagaagugagug

SEQ ID NO: 4198 - RNA, 18 nt, artificial
  Chemically synthesized
uuuucugcucagcacggu

SEQ ID NO: 4199 - RNA, 18 nt, artificial
  Chemically synthesized
gaggaaacaagagauucu

SEQ ID NO: 4200 - RNA, 18 nt, artificial
  Chemically synthesized
auaggagaagagagcugu

SEQ ID NO: 4201 - RNA, 18 nt, artificial
  Chemically synthesized
ccacuggaauucugagga

SEQ ID NO: 4202 - RNA, 18 nt, artificial
  Chemically synthesized
cugcagaaaacaagggcc

SEQ ID NO: 4203 - RNA, 18 nt, artificial
  Chemically synthesized
gucucccuccagacccac

SEQ ID NO: 4204 - RNA, 18 nt, artificial
  Chemically synthesized
ugggaggaaacaagagau

SEQ ID NO: 4205 - RNA, 18 nt, artificial
  Chemically synthesized
aucugguaccugugguuc

SEQ ID NO: 4206 - RNA, 18 nt, artificial
  Chemically synthesized
gucgaaacccuuggaggc

SEQ ID NO: 4207 - RNA, 18 nt, artificial
  Chemically synthesized
aguguuuuauucaugcug

SEQ ID NO: 4208 - RNA, 18 nt, artificial
  Chemically synthesized
aggcucuucuucugggug

SEQ ID NO: 4209 - RNA, 18 nt, artificial
  Chemically synthesized
uggacugguccauuauga

SEQ ID NO: 4210 - RNA, 18 nt, artificial
  Chemically synthesized
agucacagagggugaugu

SEQ ID NO: 4211 - RNA, 18 nt, artificial
  Chemically synthesized
augcuguuuccaggaagg

SEQ ID NO: 4212 - RNA, 18 nt, artificial
  Chemically synthesized
ucgaaacccuuggaggcu

SEQ ID NO: 4213 - RNA, 18 nt, artificial
  Chemically synthesized
aaagaagugaguguguca

SEQ ID NO: 4214 - RNA, 18 nt, artificial
  Chemically synthesized
ucucccuccagacccaca

SEQ ID NO: 4215 - RNA, 18 nt, artificial
  Chemically synthesized
augccaaauggagagccu

SEQ ID NO: 4216 - RNA, 18 nt, artificial
  Chemically synthesized
ugaaaucacauggacugg

SEQ ID NO: 4217 - RNA, 18 nt, artificial
  Chemically synthesized
ggaccuuggacccacguc

SEQ ID NO: 4218 - RNA, 18 nt, artificial
  Chemically synthesized
acccagcuuuuucugucc

SEQ ID NO: 4219 - RNA, 18 nt, artificial
  Chemically synthesized
augaaagggaccugguag

SEQ ID NO: 4220 - RNA, 18 nt, artificial
  Chemically synthesized
acuggaauucugaggauu

SEQ ID NO: 4221 - RNA, 18 nt, artificial
  Chemically synthesized
gaccgaaccuacucaaag

SEQ ID NO: 4222 - RNA, 18 nt, artificial
  Chemically synthesized
ugucagcugccacccggc

SEQ ID NO: 4223 - RNA, 18 nt, artificial
  Chemically synthesized
acccucaaaaguuucugc

SEQ ID NO: 4224 - RNA, 18 nt, artificial
  Chemically synthesized
uucaagaacuagccacug

SEQ ID NO: 4225 - RNA, 18 nt, artificial
  Chemically synthesized
guuucucgcucccauuuc

SEQ ID NO: 4226 - RNA, 18 nt, artificial
  Chemically synthesized
gagacaugcgcagucugc

SEQ ID NO: 4227 - RNA, 18 nt, artificial
  Chemically synthesized
agcacaggaaugauuaca

SEQ ID NO: 4228 - RNA, 18 nt, artificial
  Chemically synthesized
caagucuaauaccuacca

SEQ ID NO: 4229 - RNA, 18 nt, artificial
  Chemically synthesized
cagaaacaggaguaaaug

SEQ ID NO: 4230 - RNA, 18 nt, artificial
  Chemically synthesized
gaaggucucagacuucau

SEQ ID NO: 4231 - RNA, 18 nt, artificial
  Chemically synthesized
gaaagggaagucaucaag

SEQ ID NO: 4232 - RNA, 18 nt, artificial
  Chemically synthesized
auugcaaaacgccuguug

SEQ ID NO: 4233 - RNA, 18 nt, artificial
  Chemically synthesized
uuggaggccugcuuaugg

SEQ ID NO: 4234 - RNA, 18 nt, artificial
  Chemically synthesized
aacuuuaggucacuguac

SEQ ID NO: 4235 - RNA, 18 nt, artificial
  Chemically synthesized
cuggacuucuuacuaugc

SEQ ID NO: 4236 - RNA, 18 nt, artificial
  Chemically synthesized
ugagaaagaagugagugu

SEQ ID NO: 4237 - RNA, 18 nt, artificial
  Chemically synthesized
auacuggauccucuugau

SEQ ID NO: 4238 - RNA, 18 nt, artificial
  Chemically synthesized
guccacuuccuucucacu

SEQ ID NO: 4239 - RNA, 18 nt, artificial
  Chemically synthesized
gaauccaccugcauaggc

SEQ ID NO: 4240 - RNA, 18 nt, artificial
  Chemically synthesized
uuggcaucugugacggug

SEQ ID NO: 4241 - RNA, 18 nt, artificial
  Chemically synthesized
ccagucugcccuagaaag

SEQ ID NO: 4242 - RNA, 18 nt, artificial
  Chemically synthesized
ucagucuuugagggaggg

SEQ ID NO: 4243 - RNA, 18 nt, artificial
  Chemically synthesized
acuucuuacuaugcuuag

SEQ ID NO: 4244 - RNA, 18 nt, artificial
  Chemically synthesized
cagaaguugguauaucug

SEQ ID NO: 4245 - RNA, 18 nt, artificial
  Chemically synthesized
aaguugguauaucugcaa

SEQ ID NO: 4246 - RNA, 18 nt, artificial
  Chemically synthesized
caaggcucagagggaggc

SEQ ID NO: 4247 - RNA, 18 nt, artificial
  Chemically synthesized
ugcaaaaugcacauuucc

SEQ ID NO: 4248 - RNA, 18 nt, artificial
  Chemically synthesized
gaacacuaagccugggag

SEQ ID NO: 4249 - RNA, 18 nt, artificial
  Chemically synthesized
gugagugugucaccaaag

SEQ ID NO: 4250 - RNA, 18 nt, artificial
  Chemically synthesized
ccgucacuucucuugaug

SEQ ID NO: 4251 - RNA, 18 nt, artificial
  Chemically synthesized
cgugcagaacgauggcug

SEQ ID NO: 4252 - RNA, 18 nt, artificial
  Chemically synthesized
gauggcugucagucuuug

SEQ ID NO: 4253 - RNA, 18 nt, artificial
  Chemically synthesized
ccuguuuuguuuucugcu

SEQ ID NO: 4254 - RNA, 18 nt, artificial
  Chemically synthesized
ugggagaucccuaagugc

SEQ ID NO: 4255 - RNA, 18 nt, artificial
  Chemically synthesized
aucacauggacuggucca

SEQ ID NO: 4256 - RNA, 18 nt, artificial
  Chemically synthesized
uuucugcaaaaugcacau

SEQ ID NO: 4257 - RNA, 18 nt, artificial
  Chemically synthesized
acaggaguaaauguuaca

SEQ ID NO: 4258 - RNA, 18 nt, artificial
  Chemically synthesized
cacaggaaugauuacagc

SEQ ID NO: 4259 - RNA, 18 nt, artificial
  Chemically synthesized
aacaagagauucuccuua

SEQ ID NO: 4260 - RNA, 18 nt, artificial
  Chemically synthesized
ugcgcagucugcuuguca

SEQ ID NO: 4261 - RNA, 18 nt, artificial
  Chemically synthesized
ugauaucaccauacagga

SEQ ID NO: 4262 - RNA, 18 nt, artificial
  Chemically synthesized
gagaaaguucuuccuauc

SEQ ID NO: 4263 - RNA, 18 nt, artificial
  Chemically synthesized
aaacacagcacaggaaug

SEQ ID NO: 4264 - RNA, 18 nt, artificial
  Chemically synthesized
gcuagggaagggaccuug

SEQ ID NO: 4265 - RNA, 18 nt, artificial
  Chemically synthesized
cuggagaaccaaagacgg

SEQ ID NO: 4266 - RNA, 18 nt, artificial
  Chemically synthesized
ccagaacaggcaagaagc

SEQ ID NO: 4267 - RNA, 18 nt, artificial
  Chemically synthesized
ucuugcacucgcagccca

SEQ ID NO: 4268 - RNA, 18 nt, artificial
  Chemically synthesized
uugcacucgcagcccauc

SEQ ID NO: 4269 - RNA, 18 nt, artificial
  Chemically synthesized
ugccugaugccagaacag

SEQ ID NO: 4270 - RNA, 18 nt, artificial
  Chemically synthesized
gccgauuccuggauaccc

SEQ ID NO: 4271 - RNA, 18 nt, artificial
  Chemically synthesized
uccucuugauaggguugc

SEQ ID NO: 4272 - RNA, 18 nt, artificial
  Chemically synthesized
ucaggaugugcagauggg

SEQ ID NO: 4273 - RNA, 18 nt, artificial
  Chemically synthesized
gagccuucuuaaacuaua

SEQ ID NO: 4274 - RNA, 18 nt, artificial
  Chemically synthesized
guaccugugguucaggcu

SEQ ID NO: 4275 - RNA, 18 nt, artificial
  Chemically synthesized
cuacacagucuugcaacg

SEQ ID NO: 4276 - RNA, 18 nt, artificial
  Chemically synthesized
ugcuuggcaucugugacg

SEQ ID NO: 4277 - RNA, 18 nt, artificial
  Chemically synthesized
gaguccacuuccuucuca

SEQ ID NO: 4278 - RNA, 18 nt, artificial
  Chemically synthesized
cuguuuccaggaagggau

SEQ ID NO: 4279 - RNA, 18 nt, artificial
  Chemically synthesized
gucuuaacaggugcuuug

SEQ ID NO: 4280 - RNA, 18 nt, artificial
  Chemically synthesized
ucaagaugaaagggaccu

SEQ ID NO: 4281 - RNA, 18 nt, artificial
  Chemically synthesized
acaaccaugucuaaaagg

SEQ ID NO: 4282 - RNA, 18 nt, artificial
  Chemically synthesized
uccuucccuuccuaggcu

SEQ ID NO: 4283 - RNA, 18 nt, artificial
  Chemically synthesized
cacaagcccggauaaagc

SEQ ID NO: 4284 - RNA, 18 nt, artificial
  Chemically synthesized
augaaaauaggagaagag

SEQ ID NO: 4285 - RNA, 18 nt, artificial
  Chemically synthesized
acagagcuuuaaauuacg

SEQ ID NO: 4286 - RNA, 18 nt, artificial
  Chemically synthesized
caucuuaccaacuuuagg

SEQ ID NO: 4287 - RNA, 18 nt, artificial
  Chemically synthesized
auaaaaaacacagcacag

SEQ ID NO: 4288 - RNA, 18 nt, artificial
  Chemically synthesized
acgcguuccacucugggu

SEQ ID NO: 4289 - RNA, 18 nt, artificial
  Chemically synthesized
gagagcugugcuuagaac

SEQ ID NO: 4290 - RNA, 18 nt, artificial
  Chemically synthesized
ggguaauaaaaaacacag

SEQ ID NO: 4291 - RNA, 18 nt, artificial
  Chemically synthesized
augugcaucuugccgucc

SEQ ID NO: 4292 - RNA, 18 nt, artificial
  Chemically synthesized
aacggaaacaaaaucaac

SEQ ID NO: 4293 - RNA, 18 nt, artificial
  Chemically synthesized
aaccaugucuaaaaggag

SEQ ID NO: 4294 - RNA, 18 nt, artificial
  Chemically synthesized
gaaugauacaaagcauca

SEQ ID NO: 4295 - RNA, 18 nt, artificial
  Chemically synthesized
acacaagcccggauaaag

SEQ ID NO: 4296 - RNA, 18 nt, artificial
  Chemically synthesized
cguguagauaaacucuau

SEQ ID NO: 4297 - RNA, 18 nt, artificial
  Chemically synthesized
acccagcugggagauccc

SEQ ID NO: 4298 - RNA, 18 nt, artificial
  Chemically synthesized
ucugcaacucagguucac

SEQ ID NO: 4299 - RNA, 18 nt, artificial
  Chemically synthesized
aguccauccagaggcacu

SEQ ID NO: 4300 - RNA, 18 nt, artificial
  Chemically synthesized
gucugcuugucaacuuuc

SEQ ID NO: 4301 - RNA, 18 nt, artificial
  Chemically synthesized
uuuggaagcauuuugcaa

SEQ ID NO: 4302 - RNA, 18 nt, artificial
  Chemically synthesized
ucgucaguuuaucuuuac

SEQ ID NO: 4303 - RNA, 18 nt, artificial
  Chemically synthesized
aggcuaagguggcuuugg

SEQ ID NO: 4304 - RNA, 18 nt, artificial
  Chemically synthesized
caagacccagcuuuuucu

SEQ ID NO: 4305 - RNA, 18 nt, artificial
  Chemically synthesized
agcuuuaaauuacggcag

SEQ ID NO: 4306 - RNA, 18 nt, artificial
  Chemically synthesized
cucucaagaugaaaggga

SEQ ID NO: 4307 - RNA, 18 nt, artificial
  Chemically synthesized
agggaagucaucaagauc

SEQ ID NO: 4308 - RNA, 18 nt, artificial
  Chemically synthesized
uucaggaaaccacacuga

SEQ ID NO: 4309 - RNA, 18 nt, artificial
  Chemically synthesized
ggcucagagggaggcucc

SEQ ID NO: 4310 - RNA, 18 nt, artificial
  Chemically synthesized
cauuaugacaucuuacca

SEQ ID NO: 4311 - RNA, 18 nt, artificial
  Chemically synthesized
acucugggucaaaugcuu

SEQ ID NO: 4312 - RNA, 18 nt, artificial
  Chemically synthesized
cuaggaaguuucuuagcu

SEQ ID NO: 4313 - RNA, 18 nt, artificial
  Chemically synthesized
ccggcucuucuuaaccug

SEQ ID NO: 4314 - RNA, 18 nt, artificial
  Chemically synthesized
ucagagacaugcgcaguc

SEQ ID NO: 4315 - RNA, 18 nt, artificial
  Chemically synthesized
cuuucagaccgaaccuac

SEQ ID NO: 4316 - RNA, 18 nt, artificial
  Chemically synthesized
ucugcuugucaacuuuca

SEQ ID NO: 4317 - RNA, 18 nt, artificial
  Chemically synthesized
gaaauacaagcagaaguu

SEQ ID NO: 4318 - RNA, 18 nt, artificial
  Chemically synthesized
augcgcagucugcuuguc

SEQ ID NO: 4319 - RNA, 18 nt, artificial
  Chemically synthesized
ccggaaggucucagacuu

SEQ ID NO: 4320 - RNA, 18 nt, artificial
  Chemically synthesized
caggaagggaugucagag

SEQ ID NO: 4321 - RNA, 18 nt, artificial
  Chemically synthesized
uugcguguguauguuuac

SEQ ID NO: 4322 - RNA, 18 nt, artificial
  Chemically synthesized
acccaguccauccagagg

SEQ ID NO: 4323 - RNA, 18 nt, artificial
  Chemically synthesized
cuagaaagggaagucauc

SEQ ID NO: 4324 - RNA, 18 nt, artificial
  Chemically synthesized
ugaaagggaccugguagg

SEQ ID NO: 4325 - RNA, 18 nt, artificial
  Chemically synthesized
gaugggaugaggaccuug

SEQ ID NO: 4326 - RNA, 18 nt, artificial
  Chemically synthesized
cgaaccuacucaaagauc

SEQ ID NO: 4327 - RNA, 18 nt, artificial
  Chemically synthesized
agcaaguccaauauuucu

SEQ ID NO: 4328 - RNA, 18 nt, artificial
  Chemically synthesized
aagggaccuugagggcag

SEQ ID NO: 4329 - RNA, 18 nt, artificial
  Chemically synthesized
aacacauagguucccuag

SEQ ID NO: 4330 - RNA, 18 nt, artificial
  Chemically synthesized
cuaagugcugccugcuug

SEQ ID NO: 4331 - RNA, 18 nt, artificial
  Chemically synthesized
ugaccaggucccgguggg

SEQ ID NO: 4332 - RNA, 18 nt, artificial
  Chemically synthesized
cuuccacgaugcagaaac

SEQ ID NO: 4333 - RNA, 18 nt, artificial
  Chemically synthesized
uuaccaacuuuaggucac

SEQ ID NO: 4334 - RNA, 18 nt, artificial
  Chemically synthesized
aacucuuguguguuccca

SEQ ID NO: 4335 - RNA, 18 nt, artificial
  Chemically synthesized
acaggaccucaccgauuc

SEQ ID NO: 4336 - RNA, 18 nt, artificial
  Chemically synthesized
acacuaagccugggaggg

SEQ ID NO: 4337 - RNA, 18 nt, artificial
  Chemically synthesized
gcugcccuuggauguggg

SEQ ID NO: 4338 - RNA, 18 nt, artificial
  Chemically synthesized
aaggcucagagggaggcu

SEQ ID NO: 4339 - RNA, 18 nt, artificial
  Chemically synthesized
auguagcacgggaucaug

SEQ ID NO: 4340 - RNA, 18 nt, artificial
  Chemically synthesized
auggacugguccauuaug

SEQ ID NO: 4341 - RNA, 18 nt, artificial
  Chemically synthesized
cugcuuggcaucugugac

SEQ ID NO: 4342 - RNA, 18 nt, artificial
  Chemically synthesized
gucacuucucuugaugca

SEQ ID NO: 4343 - RNA, 18 nt, artificial
  Chemically synthesized
ccagcaccggaaggucuc

SEQ ID NO: 4344 - RNA, 18 nt, artificial
  Chemically synthesized
aaguuucuuagcuaggua

SEQ ID NO: 4345 - RNA, 18 nt, artificial
  Chemically synthesized
cugaggcuggaacgcagc

SEQ ID NO: 4346 - RNA, 18 nt, artificial
  Chemically synthesized
acuggcuucaggaaacca

SEQ ID NO: 4347 - RNA, 18 nt, artificial
  Chemically synthesized
ccugaucacuacaucugc

SEQ ID NO: 4348 - RNA, 18 nt, artificial
  Chemically synthesized
ugcaacucaauccaggug

SEQ ID NO: 4349 - RNA, 18 nt, artificial
  Chemically synthesized
uuugaacuggagaaccaa

SEQ ID NO: 4350 - RNA, 18 nt, artificial
  Chemically synthesized
aucugugacggugccaag

SEQ ID NO: 4351 - RNA, 18 nt, artificial
  Chemically synthesized
cuaagguggcuuuggaag

SEQ ID NO: 4352 - RNA, 18 nt, artificial
  Chemically synthesized
augcacauuuccaggccc

SEQ ID NO: 4353 - RNA, 18 nt, artificial
  Chemically synthesized
ugggagggaagccgcgug

SEQ ID NO: 4354 - RNA, 18 nt, artificial
  Chemically synthesized
augcaggcgaagaacuug

SEQ ID NO: 4355 - RNA, 18 nt, artificial
  Chemically synthesized
ccauaucacuggcuucag

SEQ ID NO: 4356 - RNA, 18 nt, artificial
  Chemically synthesized
uguccuggaggcugagaa

SEQ ID NO: 4357 - RNA, 18 nt, artificial
  Chemically synthesized
uaccuaccaaggguaaua

SEQ ID NO: 4358 - RNA, 18 nt, artificial
  Chemically synthesized
aaccuacucaaagauccu

SEQ ID NO: 4359 - RNA, 18 nt, artificial
  Chemically synthesized
gggacugggagggaagcc

SEQ ID NO: 4360 - RNA, 18 nt, artificial
  Chemically synthesized
uccuuaucauuaccgaga

SEQ ID NO: 4361 - RNA, 18 nt, artificial
  Chemically synthesized
ccgauuccuccugcaagc

SEQ ID NO: 4362 - RNA, 18 nt, artificial
  Chemically synthesized
agcauuuugcaagaccac

SEQ ID NO: 4363 - RNA, 18 nt, artificial
  Chemically synthesized
aaaaagacucagcugagg

SEQ ID NO: 4364 - RNA, 18 nt, artificial
  Chemically synthesized
acaggagccgucacuucu

SEQ ID NO: 4365 - RNA, 18 nt, artificial
  Chemically synthesized
gcauuuugcaagaccacg

SEQ ID NO: 4366 - RNA, 18 nt, artificial
  Chemically synthesized
ugcugaccaggucccggu

SEQ ID NO: 4367 - RNA, 18 nt, artificial
  Chemically synthesized
gaccaacguguguggauc

SEQ ID NO: 4368 - RNA, 18 nt, artificial
  Chemically synthesized
guguguggaucaaauaua

SEQ ID NO: 4369 - RNA, 18 nt, artificial
  Chemically synthesized
cugagggaacacauaggu

SEQ ID NO: 4370 - RNA, 18 nt, artificial
  Chemically synthesized
ccaaggguaauaaaaaac

SEQ ID NO: 4371 - RNA, 18 nt, artificial
  Chemically synthesized
guuuccagaguccacuuc

SEQ ID NO: 4372 - RNA, 18 nt, artificial
  Chemically synthesized
acugggagggaagccgcg

SEQ ID NO: 4373 - RNA, 18 nt, artificial
  Chemically synthesized
uggauccucuugauaggg

SEQ ID NO: 4374 - RNA, 18 nt, artificial
  Chemically synthesized
cagaggcacucguccggg

SEQ ID NO: 4375 - RNA, 18 nt, artificial
  Chemically synthesized
aagaagcaauggcaaccg

SEQ ID NO: 4376 - RNA, 18 nt, artificial
  Chemically synthesized
gguaauaaaaaacacagc

SEQ ID NO: 4377 - RNA, 18 nt, artificial
  Chemically synthesized
agugcagaggcguggaag

SEQ ID NO: 4378 - RNA, 18 nt, artificial
  Chemically synthesized
aggccugcuuaugggucc

SEQ ID NO: 4379 - RNA, 18 nt, artificial
  Chemically synthesized
gaugggagcacuugccag

SEQ ID NO: 4380 - RNA, 18 nt, artificial
  Chemically synthesized
uauaaaggccacaccuuu

SEQ ID NO: 4381 - RNA, 18 nt, artificial
  Chemically synthesized
uuuacauaaugugccugu

SEQ ID NO: 4382 - RNA, 18 nt, artificial
  Chemically synthesized
ugcccuagaaagggaagu

SEQ ID NO: 4383 - RNA, 18 nt, artificial
  Chemically synthesized
cggaaacaaaaucaacag

SEQ ID NO: 4384 - RNA, 18 nt, artificial
  Chemically synthesized
uccuucucaggcccuuug

SEQ ID NO: 4385 - RNA, 18 nt, artificial
  Chemically synthesized
uucuggguggugcucagg

SEQ ID NO: 4386 - RNA, 18 nt, artificial
  Chemically synthesized
aaagggaagucaucaaga

SEQ ID NO: 4387 - RNA, 18 nt, artificial
  Chemically synthesized
gcgcgugaucuugcacuc

SEQ ID NO: 4388 - RNA, 18 nt, artificial
  Chemically synthesized
aaauccaaacggaaacaa

SEQ ID NO: 4389 - RNA, 18 nt, artificial
  Chemically synthesized
aaggcagggacugggagg

SEQ ID NO: 4390 - RNA, 18 nt, artificial
  Chemically synthesized
aagggaccugguaggccu

SEQ ID NO: 4391 - RNA, 18 nt, artificial
  Chemically synthesized
agggugaugugcaucuug

SEQ ID NO: 4392 - RNA, 18 nt, artificial
  Chemically synthesized
uauuccuucuuuccucca

SEQ ID NO: 4393 - RNA, 18 nt, artificial
  Chemically synthesized
gcuagguaaucuuuguca

SEQ ID NO: 4394 - RNA, 18 nt, artificial
  Chemically synthesized
ugugucaccaaagccacc

SEQ ID NO: 4395 - RNA, 18 nt, artificial
  Chemically synthesized
aggcugagaaagaaguga

SEQ ID NO: 4396 - RNA, 18 nt, artificial
  Chemically synthesized
acagcacaggaaugauua

SEQ ID NO: 4397 - RNA, 18 nt, artificial
  Chemically synthesized
uuucagaccgaaccuacu

SEQ ID NO: 4398 - RNA, 18 nt, artificial
  Chemically synthesized
caucugcauugcaaaacg

SEQ ID NO: 4399 - RNA, 18 nt, artificial
  Chemically synthesized
gaacuuggccuggugccc

SEQ ID NO: 4400 - RNA, 18 nt, artificial
  Chemically synthesized
guugauguucuucucugu

SEQ ID NO: 4401 - RNA, 18 nt, artificial
  Chemically synthesized
ccuuggaggcuuuuuuug

SEQ ID NO: 4402 - RNA, 18 nt, artificial
  Chemically synthesized
aagucuaauaccuaccaa

SEQ ID NO: 4403 - RNA, 18 nt, artificial
  Chemically synthesized
agcauaaacacagugcuc

SEQ ID NO: 4404 - RNA, 18 nt, artificial
  Chemically synthesized
acuuuaggucacuguaca

SEQ ID NO: 4405 - RNA, 18 nt, artificial
  Chemically synthesized
gcaaguccaauauuucuu

SEQ ID NO: 4406 - RNA, 18 nt, artificial
  Chemically synthesized
gacccucaaaaguuucug

SEQ ID NO: 4407 - RNA, 18 nt, artificial
  Chemically synthesized
ucugcccuagaaagggaa

SEQ ID NO: 4408 - RNA, 18 nt, artificial
  Chemically synthesized
aggcugcccuuggaugug

SEQ ID NO: 4409 - RNA, 18 nt, artificial
  Chemically synthesized
caugucccucucaagaug

SEQ ID NO: 4410 - RNA, 18 nt, artificial
  Chemically synthesized
cgucacaugcagaaagcc

SEQ ID NO: 4411 - RNA, 18 nt, artificial
  Chemically synthesized
uaggaaguuucuuagcua

SEQ ID NO: 4412 - RNA, 18 nt, artificial
  Chemically synthesized
caggcugcccuuggaugu

SEQ ID NO: 4413 - RNA, 18 nt, artificial
  Chemically synthesized
ucuuugagggagggaaca

SEQ ID NO: 4414 - RNA, 18 nt, artificial
  Chemically synthesized
ggugcagaccaaaaagac

SEQ ID NO: 4415 - RNA, 18 nt, artificial
  Chemically synthesized
ggugcugggagcucaugg

SEQ ID NO: 4416 - RNA, 18 nt, artificial
  Chemically synthesized
gcccugaucacuacaucu

SEQ ID NO: 4417 - RNA, 18 nt, artificial
  Chemically synthesized
accaaagccaccuaccuc

SEQ ID NO: 4418 - RNA, 18 nt, artificial
  Chemically synthesized
aagguauuugagcggcuu

SEQ ID NO: 4419 - RNA, 18 nt, artificial
  Chemically synthesized
ccauuucuacaaggcuca

SEQ ID NO: 4420 - RNA, 18 nt, artificial
  Chemically synthesized
cuaugcuuagcuggcguc

SEQ ID NO: 4421 - RNA, 18 nt, artificial
  Chemically synthesized
cagaggcguggaagcugc

SEQ ID NO: 4422 - RNA, 18 nt, artificial
  Chemically synthesized
ggcucccacuggaauucu

SEQ ID NO: 4423 - RNA, 18 nt, artificial
  Chemically synthesized
ugcauaggccacgcguuc

SEQ ID NO: 4424 - RNA, 18 nt, artificial
  Chemically synthesized
agacccagcuuuuucugu

SEQ ID NO: 4425 - RNA, 18 nt, artificial
  Chemically synthesized
ugcaaugagauauuccuu

SEQ ID NO: 4426 - RNA, 18 nt, artificial
  Chemically synthesized
ucauacuggauccucuug

SEQ ID NO: 4427 - RNA, 18 nt, artificial
  Chemically synthesized
cggcuuccucugucagcu

SEQ ID NO: 4428 - RNA, 18 nt, artificial
  Chemically synthesized
augggaugaguguuuuau

SEQ ID NO: 4429 - RNA, 18 nt, artificial
  Chemically synthesized
ggaggaaacaagagauuc

SEQ ID NO: 4430 - RNA, 18 nt, artificial
  Chemically synthesized
cugugcuuagaacauaac

SEQ ID NO: 4431 - RNA, 18 nt, artificial
  Chemically synthesized
guuaaaagaccaacgugu

SEQ ID NO: 4432 - RNA, 18 nt, artificial
  Chemically synthesized
gccuguugcgggugcacc

SEQ ID NO: 4433 - RNA, 18 nt, artificial
  Chemically synthesized
augcuuccacgaugcaga

SEQ ID NO: 4434 - RNA, 18 nt, artificial
  Chemically synthesized
acacauagugccuggcag

SEQ ID NO: 4435 - RNA, 18 nt, artificial
  Chemically synthesized
cggaaggucucagacuuc

SEQ ID NO: 4436 - RNA, 18 nt, artificial
  Chemically synthesized
aagaucugugcugaccag

SEQ ID NO: 4437 - RNA, 18 nt, artificial
  Chemically synthesized
aguuucugcaaaaugcac

SEQ ID NO: 4438 - RNA, 18 nt, artificial
  Chemically synthesized
augucccucucaagauga

SEQ ID NO: 4439 - RNA, 18 nt, artificial
  Chemically synthesized
cugggagaucccuaagug

SEQ ID NO: 4440 - RNA, 18 nt, artificial
  Chemically synthesized
cuucgguuucauugcgug

SEQ ID NO: 4441 - RNA, 18 nt, artificial
  Chemically synthesized
gaacgauggcugucaguc

SEQ ID NO: 4442 - RNA, 18 nt, artificial
  Chemically synthesized
gauccuuuacuuugcaau

SEQ ID NO: 4443 - RNA, 18 nt, artificial
  Chemically synthesized
uaggccacgcguuccacu

SEQ ID NO: 4444 - RNA, 18 nt, artificial
  Chemically synthesized
acaccuuucagaccgaac

SEQ ID NO: 4445 - RNA, 18 nt, artificial
  Chemically synthesized
cugaucacuacaucugca

SEQ ID NO: 4446 - RNA, 18 nt, artificial
  Chemically synthesized
accacacugagggaacac

SEQ ID NO: 4447 - RNA, 18 nt, artificial
  Chemically synthesized
gagcuuuaaauuacggca

SEQ ID NO: 4448 - RNA, 18 nt, artificial
  Chemically synthesized
aagcaauggcaaccgcag

SEQ ID NO: 4449 - RNA, 18 nt, artificial
  Chemically synthesized
uaccacgcacaggagccg

SEQ ID NO: 4450 - RNA, 18 nt, artificial
  Chemically synthesized
cuggaccagucgaaaccc

SEQ ID NO: 4451 - RNA, 18 nt, artificial
  Chemically synthesized
ccguugauguucuucucu

SEQ ID NO: 4452 - RNA, 18 nt, artificial
  Chemically synthesized
ucacauggacugguccau

SEQ ID NO: 4453 - RNA, 18 nt, artificial
  Chemically synthesized
ggaggagauguagcacgg

SEQ ID NO: 4454 - RNA, 18 nt, artificial
  Chemically synthesized
ucuuaacaggugcuuugg

SEQ ID NO: 4455 - RNA, 18 nt, artificial
  Chemically synthesized
aggcuuuuuuugcaguug

SEQ ID NO: 4456 - RNA, 18 nt, artificial
  Chemically synthesized
uccuggaggcugagaaag

SEQ ID NO: 4457 - RNA, 18 nt, artificial
  Chemically synthesized
ugagaauucaccuuuaga

SEQ ID NO: 4458 - RNA, 18 nt, artificial
  Chemically synthesized
gauacccucccagucugc

SEQ ID NO: 4459 - RNA, 18 nt, artificial
  Chemically synthesized
acuagccacugguuccag

SEQ ID NO: 4460 - RNA, 18 nt, artificial
  Chemically synthesized
uaggccugcuacacaguc

SEQ ID NO: 4461 - RNA, 18 nt, artificial
  Chemically synthesized
caggcgaagaacuuggcc

SEQ ID NO: 4462 - RNA, 18 nt, artificial
  Chemically synthesized
accauacaggaagcgaac

SEQ ID NO: 4463 - RNA, 18 nt, artificial
  Chemically synthesized
gaggcucccacuggaauu

SEQ ID NO: 4464 - RNA, 18 nt, artificial
  Chemically synthesized
cuuuggaagcauuuugca

SEQ ID NO: 4465 - RNA, 18 nt, artificial
  Chemically synthesized
ucagacuucauauuccag

SEQ ID NO: 4466 - RNA, 18 nt, artificial
  Chemically synthesized
agccugggagggcacagc

SEQ ID NO: 4467 - RNA, 18 nt, artificial
  Chemically synthesized
cacucgcagcccaucugg

SEQ ID NO: 4468 - RNA, 18 nt, artificial
  Chemically synthesized
agaagcaauggcaaccgc

SEQ ID NO: 4469 - RNA, 18 nt, artificial
  Chemically synthesized
aacaaaaucaacagagcu

SEQ ID NO: 4470 - RNA, 18 nt, artificial
  Chemically synthesized
gauugcucaagaaugaua

SEQ ID NO: 4471 - RNA, 18 nt, artificial
  Chemically synthesized
gacccacgucucccucca

SEQ ID NO: 4472 - RNA, 18 nt, artificial
  Chemically synthesized
uucccuaggaaguuucuu

SEQ ID NO: 4473 - RNA, 18 nt, artificial
  Chemically synthesized
acagcaagacccagcuuu

SEQ ID NO: 4474 - RNA, 18 nt, artificial
  Chemically synthesized
ggucucagacuucauauu

SEQ ID NO: 4475 - RNA, 18 nt, artificial
  Chemically synthesized
uaucacuggcuucaggaa

SEQ ID NO: 4476 - RNA, 18 nt, artificial
  Chemically synthesized
aucagcagaaacaggagu

SEQ ID NO: 4477 - RNA, 18 nt, artificial
  Chemically synthesized
agggaacacuaagccugg

SEQ ID NO: 4478 - RNA, 18 nt, artificial
  Chemically synthesized
ccacgcguuccacucugg

SEQ ID NO: 4479 - RNA, 18 nt, artificial
  Chemically synthesized
agaugaaagggaccuggu

SEQ ID NO: 4480 - RNA, 18 nt, artificial
  Chemically synthesized
uccauccagaggcacucg

SEQ ID NO: 4481 - RNA, 18 nt, artificial
  Chemically synthesized
acacugagggaacacaua

SEQ ID NO: 4482 - RNA, 18 nt, artificial
  Chemically synthesized
acuguacagcaugaaaac

SEQ ID NO: 4483 - RNA, 18 nt, artificial
  Chemically synthesized
cuggauacccucccaguc

SEQ ID NO: 4484 - RNA, 18 nt, artificial
  Chemically synthesized
aucaagaucugugcugac

SEQ ID NO: 4485 - RNA, 18 nt, artificial
  Chemically synthesized
aagaccacgcccaggccg

SEQ ID NO: 4486 - RNA, 18 nt, artificial
  Chemically synthesized
gugaucuugcacucgcag

SEQ ID NO: 4487 - RNA, 18 nt, artificial
  Chemically synthesized
uaaaggccacaccuuuca

SEQ ID NO: 4488 - RNA, 18 nt, artificial
  Chemically synthesized
gugccugaugccagaaca

SEQ ID NO: 4489 - RNA, 18 nt, artificial
  Chemically synthesized
ggcccugcacacaagccc

SEQ ID NO: 4490 - RNA, 18 nt, artificial
  Chemically synthesized
ggcucuucuucugggugg

SEQ ID NO: 4491 - RNA, 18 nt, artificial
  Chemically synthesized
uggaacgcagcucagcug

SEQ ID NO: 4492 - RNA, 18 nt, artificial
  Chemically synthesized
ugacccaguccauccaga

SEQ ID NO: 4493 - RNA, 18 nt, artificial
  Chemically synthesized
gagaaacuccugcuuggg

SEQ ID NO: 4494 - RNA, 18 nt, artificial
  Chemically synthesized
auauaaaggccacaccuu

SEQ ID NO: 4495 - RNA, 18 nt, artificial
  Chemically synthesized
aacacuaagccugggagg

SEQ ID NO: 4496 - RNA, 18 nt, artificial
  Chemically synthesized
ggcuuuuuuugcaguugg

SEQ ID NO: 4497 - RNA, 18 nt, artificial
  Chemically synthesized
cugugcaacucaauccag

SEQ ID NO: 4498 - RNA, 18 nt, artificial
  Chemically synthesized
ucucuuaaaacaggccau

SEQ ID NO: 4499 - RNA, 18 nt, artificial
  Chemically synthesized
uugcucaagaaugauaca

SEQ ID NO: 4500 - RNA, 18 nt, artificial
  Chemically synthesized
gccguguagauaaacucu

SEQ ID NO: 4501 - RNA, 18 nt, artificial
  Chemically synthesized
ugugcugaccaggucccg

SEQ ID NO: 4502 - RNA, 18 nt, artificial
  Chemically synthesized
cuagguaaucuuugucau

SEQ ID NO: 4503 - RNA, 18 nt, artificial
  Chemically synthesized
cccauaucacuggcuuca

SEQ ID NO: 4504 - RNA, 18 nt, artificial
  Chemically synthesized
aucaaauauaaaggccac

SEQ ID NO: 4505 - RNA, 18 nt, artificial
  Chemically synthesized
gacuucuuacuaugcuua

SEQ ID NO: 4506 - RNA, 18 nt, artificial
  Chemically synthesized
uguccucaggaugugcag

SEQ ID NO: 4507 - RNA, 18 nt, artificial
  Chemically synthesized
gcagucugcuugucaacu

SEQ ID NO: 4508 - RNA, 18 nt, artificial
  Chemically synthesized
ucaggugcugggagcuca

SEQ ID NO: 4509 - RNA, 18 nt, artificial
  Chemically synthesized
ggucaggagucuuaacag

SEQ ID NO: 4510 - RNA, 18 nt, artificial
  Chemically synthesized
gucacagagggugaugug

SEQ ID NO: 4511 - RNA, 18 nt, artificial
  Chemically synthesized
agucugcuugucaacuuu

SEQ ID NO: 4512 - RNA, 18 nt, artificial
  Chemically synthesized
gggcugcaugccacuugg

SEQ ID NO: 4513 - RNA, 18 nt, artificial
  Chemically synthesized
ucgcagcccaucugguac

SEQ ID NO: 4514 - RNA, 18 nt, artificial
  Chemically synthesized
aaaauccaaacggaaaca

SEQ ID NO: 4515 - RNA, 18 nt, artificial
  Chemically synthesized
ccgaaccuacucaaagau

SEQ ID NO: 4516 - RNA, 18 nt, artificial
  Chemically synthesized
agauguagcacgggauca

SEQ ID NO: 4517 - RNA, 18 nt, artificial
  Chemically synthesized
gaucugugcugaccaggu

SEQ ID NO: 4518 - RNA, 18 nt, artificial
  Chemically synthesized
gaggcugagaaagaagug

SEQ ID NO: 4519 - RNA, 18 nt, artificial
  Chemically synthesized
aauggcaaccgcagcagc

SEQ ID NO: 4520 - RNA, 18 nt, artificial
  Chemically synthesized
aacaggcaagaagcaaug

SEQ ID NO: 4521 - RNA, 18 nt, artificial
  Chemically synthesized
acccacgucucccuccag

SEQ ID NO: 4522 - RNA, 18 nt, artificial
  Chemically synthesized
gaagugagugugucacca

SEQ ID NO: 4523 - RNA, 18 nt, artificial
  Chemically synthesized
gcgugucccagcccugcc

SEQ ID NO: 4524 - RNA, 18 nt, artificial
  Chemically synthesized
ucugguaccugugguuca

SEQ ID NO: 4525 - RNA, 18 nt, artificial
  Chemically synthesized
aguucuuccuauccuaac

SEQ ID NO: 4526 - RNA, 18 nt, artificial
  Chemically synthesized
cccggauaaagcaaagcu

SEQ ID NO: 4527 - RNA, 18 nt, artificial
  Chemically synthesized
acagcagccucaggacag

SEQ ID NO: 4528 - RNA, 18 nt, artificial
  Chemically synthesized
gaacaggcaagaagcaau

SEQ ID NO: 4529 - RNA, 18 nt, artificial
  Chemically synthesized
uucuucuggguggugcuc

SEQ ID NO: 4530 - RNA, 18 nt, artificial
  Chemically synthesized
uuuggcccugaucacuac

SEQ ID NO: 4531 - RNA, 18 nt, artificial
  Chemically synthesized
gucaggagucuuaacagg

SEQ ID NO: 4532 - RNA, 18 nt, artificial
  Chemically synthesized
uggaccagucgaaacccu

SEQ ID NO: 4533 - RNA, 18 nt, artificial
  Chemically synthesized
uuuggacccaugggauga

SEQ ID NO: 4534 - RNA, 18 nt, artificial
  Chemically synthesized
gcugcagaaaacaagggc

SEQ ID NO: 4535 - RNA, 18 nt, artificial
  Chemically synthesized
cgcagucugcuugucaac

SEQ ID NO: 4536 - RNA, 18 nt, artificial
  Chemically synthesized
ggaacacauagguucccu

SEQ ID NO: 4537 - RNA, 18 nt, artificial
  Chemically synthesized
ugcccuaacccagcuggg

SEQ ID NO: 4538 - RNA, 18 nt, artificial
  Chemically synthesized
cacgguuaaaagaccaac

SEQ ID NO: 4539 - RNA, 18 nt, artificial
  Chemically synthesized
uugauaggguugccauaa

SEQ ID NO: 4540 - RNA, 18 nt, artificial
  Chemically synthesized
acaucuuaccaacuuuag

SEQ ID NO: 4541 - RNA, 18 nt, artificial
  Chemically synthesized
cuaucaucugagaauuca

SEQ ID NO: 4542 - RNA, 18 nt, artificial
  Chemically synthesized
ugaaggaauccaccugca

SEQ ID NO: 4543 - RNA, 18 nt, artificial
  Chemically synthesized
caucagagacaugcgcag

SEQ ID NO: 4544 - RNA, 18 nt, artificial
  Chemically synthesized
ugcccguugauguucuuc

SEQ ID NO: 4545 - RNA, 18 nt, artificial
  Chemically synthesized
agcaggaggccgagcgcc

SEQ ID NO: 4546 - RNA, 18 nt, artificial
  Chemically synthesized
agcuuuuucuguccucag

SEQ ID NO: 4547 - RNA, 18 nt, artificial
  Chemically synthesized
aagggaagucaucaagau

SEQ ID NO: 4548 - RNA, 18 nt, artificial
  Chemically synthesized
gugcaagucuaauaccua

SEQ ID NO: 4549 - RNA, 18 nt, artificial
  Chemically synthesized
ggaaggucucagacuuca

SEQ ID NO: 4550 - RNA, 18 nt, artificial
  Chemically synthesized
cagagcuuuaaauuacgg

SEQ ID NO: 4551 - RNA, 18 nt, artificial
  Chemically synthesized
ugccaaauggagagccuu

SEQ ID NO: 4552 - RNA, 18 nt, artificial
  Chemically synthesized
gaacacauagguucccua

SEQ ID NO: 4553 - RNA, 18 nt, artificial
  Chemically synthesized
gagucaggugcugggagc

SEQ ID NO: 4554 - RNA, 18 nt, artificial
  Chemically synthesized
gcugugcaacucaaucca

SEQ ID NO: 4555 - RNA, 18 nt, artificial
  Chemically synthesized
aagcagcgucgccagcag

SEQ ID NO: 4556 - RNA, 18 nt, artificial
  Chemically synthesized
gcugaggcuggaacgcag

SEQ ID NO: 4557 - RNA, 18 nt, artificial
  Chemically synthesized
agggcacgaugaagucac

SEQ ID NO: 4558 - RNA, 18 nt, artificial
  Chemically synthesized
cucagggugucccagggc

SEQ ID NO: 4559 - RNA, 18 nt, artificial
  Chemically synthesized
gucugguggaguuguaua

SEQ ID NO: 4560 - RNA, 18 nt, artificial
  Chemically synthesized
uucccagcaccggaaggu

SEQ ID NO: 4561 - RNA, 18 nt, artificial
  Chemically synthesized
gcgucacaugcagaaagc

SEQ ID NO: 4562 - RNA, 18 nt, artificial
  Chemically synthesized
ggcugcccuuggaugugg

SEQ ID NO: 4563 - RNA, 18 nt, artificial
  Chemically synthesized
gagaucccuaagugcugc

SEQ ID NO: 4564 - RNA, 18 nt, artificial
  Chemically synthesized
augaggaccuuggaccca

SEQ ID NO: 4565 - RNA, 18 nt, artificial
  Chemically synthesized
cucccagucugcccuaga

SEQ ID NO: 4566 - RNA, 18 nt, artificial
  Chemically synthesized
uccaaaauccuucccuuc

SEQ ID NO: 4567 - RNA, 18 nt, artificial
  Chemically synthesized
ggaccucaccgauuccuc

SEQ ID NO: 4568 - RNA, 18 nt, artificial
  Chemically synthesized
uuccacucugggucaaau

SEQ ID NO: 4569 - RNA, 18 nt, artificial
  Chemically synthesized
gggcgaagcagcgucgcc

SEQ ID NO: 4570 - RNA, 18 nt, artificial
  Chemically synthesized
cugaauagaacaggcuaa

SEQ ID NO: 4571 - RNA, 18 nt, artificial
  Chemically synthesized
cuggaacgcagcucagcu

SEQ ID NO: 4572 - RNA, 18 nt, artificial
  Chemically synthesized
cagucugcuugucaacuu

SEQ ID NO: 4573 - RNA, 18 nt, artificial
  Chemically synthesized
gucaucaagaucugugcu

SEQ ID NO: 4574 - RNA, 18 nt, artificial
  Chemically synthesized
cgauuccuggauacccuc

SEQ ID NO: 4575 - RNA, 18 nt, artificial
  Chemically synthesized
gcuucaggaaaccacacu

SEQ ID NO: 4576 - RNA, 18 nt, artificial
  Chemically synthesized
caaccaugucuaaaagga

SEQ ID NO: 4577 - RNA, 18 nt, artificial
  Chemically synthesized
acacaggugggaggaaac

SEQ ID NO: 4578 - RNA, 18 nt, artificial
  Chemically synthesized
uuaaaacaggccauagug

SEQ ID NO: 4579 - RNA, 18 nt, artificial
  Chemically synthesized
cugcccuaacccagcugg

SEQ ID NO: 4580 - RNA, 18 nt, artificial
  Chemically synthesized
agcugaggcuggaacgca

SEQ ID NO: 4581 - RNA, 18 nt, artificial
  Chemically synthesized
cuucccuuccuaggcugg

SEQ ID NO: 4582 - RNA, 18 nt, artificial
  Chemically synthesized
ggcacagcaagacccagc

SEQ ID NO: 4583 - RNA, 18 nt, artificial
  Chemically synthesized
uccucgaugucgagaaac

SEQ ID NO: 4584 - RNA, 18 nt, artificial
  Chemically synthesized
gaagccgcgugucccagc

SEQ ID NO: 4585 - RNA, 18 nt, artificial
  Chemically synthesized
uacaagcagaaguuggua

SEQ ID NO: 4586 - RNA, 18 nt, artificial
  Chemically synthesized
uuccaggcugcccuugga

SEQ ID NO: 4587 - RNA, 18 nt, artificial
  Chemically synthesized
auccucuugauaggguug

SEQ ID NO: 4588 - RNA, 18 nt, artificial
  Chemically synthesized
accaaaaagacucagcug

SEQ ID NO: 4589 - RNA, 18 nt, artificial
  Chemically synthesized
gggucaggagucuuaaca

SEQ ID NO: 4590 - RNA, 18 nt, artificial
  Chemically synthesized
uacuggauccucuugaua

SEQ ID NO: 4591 - RNA, 18 nt, artificial
  Chemically synthesized
aagaacuuggccuggugc

SEQ ID NO: 4592 - RNA, 18 nt, artificial
  Chemically synthesized
agccgcgugucccagccc

SEQ ID NO: 4593 - RNA, 18 nt, artificial
  Chemically synthesized
gcagcuagggaagggacc

SEQ ID NO: 4594 - RNA, 18 nt, artificial
  Chemically synthesized
acucagguucaccuauca

SEQ ID NO: 4595 - RNA, 18 nt, artificial
  Chemically synthesized
aaaacacagcacaggaau

SEQ ID NO: 4596 - RNA, 18 nt, artificial
  Chemically synthesized
cagagggugaugugcauc

SEQ ID NO: 4597 - RNA, 18 nt, artificial
  Chemically synthesized
cagacacauagugccugg

SEQ ID NO: 4598 - RNA, 18 nt, artificial
  Chemically synthesized
agcagcgucgccagcagc

SEQ ID NO: 4599 - RNA, 18 nt, artificial
  Chemically synthesized
agggaggcucccacugga

SEQ ID NO: 4600 - RNA, 18 nt, artificial
  Chemically synthesized
ggaagggaugucagagcu

SEQ ID NO: 4601 - RNA, 18 nt, artificial
  Chemically synthesized
cggauaaagcaaagcugu

SEQ ID NO: 4602 - RNA, 18 nt, artificial
  Chemically synthesized
gggaacacauagguuccc

SEQ ID NO: 4603 - RNA, 18 nt, artificial
  Chemically synthesized
gaugucgagaaacuccug

SEQ ID NO: 4604 - RNA, 18 nt, artificial
  Chemically synthesized
agcagcuagggaagggac

SEQ ID NO: 4605 - RNA, 18 nt, artificial
  Chemically synthesized
accuuucagaccgaaccu

SEQ ID NO: 4606 - RNA, 18 nt, artificial
  Chemically synthesized
ugugccuguauaucguca

SEQ ID NO: 4607 - RNA, 18 nt, artificial
  Chemically synthesized
gugcagaccaaaaagacu

SEQ ID NO: 4608 - RNA, 18 nt, artificial
  Chemically synthesized
uggguggugcucagggug

SEQ ID NO: 4609 - RNA, 18 nt, artificial
  Chemically synthesized
cccguugauguucuucuc

SEQ ID NO: 4610 - RNA, 18 nt, artificial
  Chemically synthesized
caggagccgucacuucuc

SEQ ID NO: 4611 - RNA, 18 nt, artificial
  Chemically synthesized
cgugaucuugcacucgca

SEQ ID NO: 4612 - RNA, 18 nt, artificial
  Chemically synthesized
cucaaagauccuuuacuu

SEQ ID NO: 4613 - RNA, 18 nt, artificial
  Chemically synthesized
uguuuacauaaugugccu

SEQ ID NO: 4614 - RNA, 18 nt, artificial
  Chemically synthesized
uuguccacggaccgagcg

SEQ ID NO: 4615 - RNA, 18 nt, artificial
  Chemically synthesized
cacccggcucuucuuaac

SEQ ID NO: 4616 - RNA, 18 nt, artificial
  Chemically synthesized
auaggccacgcguuccac

SEQ ID NO: 4617 - RNA, 18 nt, artificial
  Chemically synthesized
ugacaucuuaccaacuuu

SEQ ID NO: 4618 - RNA, 18 nt, artificial
  Chemically synthesized
auggcaaccgcagcagcu

SEQ ID NO: 4619 - RNA, 18 nt, artificial
  Chemically synthesized
aaugcuuccacgaugcag

SEQ ID NO: 4620 - RNA, 18 nt, artificial
  Chemically synthesized
ucagcagaaacaggagua

SEQ ID NO: 4621 - RNA, 18 nt, artificial
  Chemically synthesized
gcucccauuucuacaagg

SEQ ID NO: 4622 - RNA, 18 nt, artificial
  Chemically synthesized
ugagggaacacauagguu

SEQ ID NO: 4623 - RNA, 18 nt, artificial
  Chemically synthesized
gagagccuucuuaaacua

SEQ ID NO: 4624 - RNA, 18 nt, artificial
  Chemically synthesized
gcaucagagacaugcgca

SEQ ID NO: 4625 - RNA, 18 nt, artificial
  Chemically synthesized
aggagccgucacuucucu

SEQ ID NO: 4626 - RNA, 18 nt, artificial
  Chemically synthesized
gaccagucgaaacccuug

SEQ ID NO: 4627 - RNA, 18 nt, artificial
  Chemically synthesized
aagagagcugugcuuaga

SEQ ID NO: 4628 - RNA, 18 nt, artificial
  Chemically synthesized
aacguguguggaucaaau

SEQ ID NO: 4629 - RNA, 18 nt, artificial
  Chemically synthesized
cagggacugggagggaag

SEQ ID NO: 4630 - RNA, 18 nt, artificial
  Chemically synthesized
caaauggagagccuucuu

SEQ ID NO: 4631 - RNA, 18 nt, artificial
  Chemically synthesized
ucugucagcugccacccg

SEQ ID NO: 4632 - RNA, 18 nt, artificial
  Chemically synthesized
cucagagggaggcuccca

SEQ ID NO: 4633 - RNA, 18 nt, artificial
  Chemically synthesized
caagcagaaguugguaua

SEQ ID NO: 4634 - RNA, 18 nt, artificial
  Chemically synthesized
ugugacccaguccaucca

SEQ ID NO: 4635 - RNA, 18 nt, artificial
  Chemically synthesized
gccacgcguuccacucug

SEQ ID NO: 4636 - RNA, 18 nt, artificial
  Chemically synthesized
gugggaggaaacaagaga

SEQ ID NO: 4637 - RNA, 18 nt, artificial
  Chemically synthesized
ugcugggagcucauggug

SEQ ID NO: 4638 - RNA, 18 nt, artificial
  Chemically synthesized
uccucaggaugugcagau

SEQ ID NO: 4639 - RNA, 18 nt, artificial
  Chemically synthesized
agcugcagaaaacaaggg

SEQ ID NO: 4640 - RNA, 18 nt, artificial
  Chemically synthesized
ugcuguuuccaggaaggg

SEQ ID NO: 4641 - RNA, 18 nt, artificial
  Chemically synthesized
gugcugggagcucauggu

SEQ ID NO: 4642 - RNA, 18 nt, artificial
  Chemically synthesized
uuaaaagaccaacgugug

SEQ ID NO: 4643 - RNA, 18 nt, artificial
  Chemically synthesized
cagaccaaaaagacucag

SEQ ID NO: 4644 - RNA, 18 nt, artificial
  Chemically synthesized
aggcagggacugggaggg

SEQ ID NO: 4645 - RNA, 18 nt, artificial
  Chemically synthesized
uaguguccuggaggcuga

SEQ ID NO: 4646 - RNA, 18 nt, Artificial Sequence
  Chemically synthesized
acaagcccggauaaagca

SEQ ID NO: 4647 - RNA, 18 nt, artificial
  Chemically synthesized
accagaugggcugcgagu

SEQ ID NO: 4648 - RNA, 18 nt, artificial
  Chemically synthesized
acagguaccagaugggcu

SEQ ID NO: 4649 - RNA, 18 nt, artificial
  Chemically synthesized
gaagagccugaaccacag

SEQ ID NO: 4650 - RNA, 18 nt, artificial
  Chemically synthesized
ucuucgccugcaucaaga

SEQ ID NO: 4651 - RNA, 18 nt, artificial
  Chemically synthesized
cgggcaccaggccaaguu

SEQ ID NO: 4652 - RNA, 18 nt, artificial
  Chemically synthesized
cgcucggccuccugcugc

SEQ ID NO: 4653 - RNA, 18 nt, artificial
  Chemically synthesized
caucccuuccuggaaaca

SEQ ID NO: 4654 - RNA, 18 nt, artificial
  Chemically synthesized
cacccgcaacaggcguuu

SEQ ID NO: 4655 - RNA, 18 nt, artificial
  Chemically synthesized
ggccgacgccugcagcug

SEQ ID NO: 4656 - RNA, 18 nt, artificial
  Chemically synthesized
gugccucuggauggacug

SEQ ID NO: 4657 - RNA, 18 nt, artificial
  Chemically synthesized
ccugaaccacagguacca

SEQ ID NO: 4658 - RNA, 18 nt, artificial
  Chemically synthesized
uccuggaaacagcaugaa

SEQ ID NO: 4659 - RNA, 18 nt, artificial
  Chemically synthesized
gucucgcuggacguugga

SEQ ID NO: 4660 - RNA, 18 nt, artificial
  Chemically synthesized
gccgacgccugcagcugc

SEQ ID NO: 4661 - RNA, 18 nt, artificial
  Chemically synthesized
aaccacagguaccagaug

SEQ ID NO: 4662 - RNA, 18 nt, artificial
  Chemically synthesized
cccggugcacccgcaaca

SEQ ID NO: 4663 - RNA, 18 nt, artificial
  Chemically synthesized
cacagguaccagaugggc

SEQ ID NO: 4664 - RNA, 18 nt, artificial
  Chemically synthesized
cccgcaacaggcguuuug

SEQ ID NO: 4665 - RNA, 18 nt, artificial
  Chemically synthesized
ucaagcagauaaagaugu

SEQ ID NO: 4666 - RNA, 18 nt, artificial
  Chemically synthesized
caccaggccaaguucuuc

SEQ ID NO: 4667 - RNA, 18 nt, artificial
  Chemically synthesized
accacagguaccagaugg

SEQ ID NO: 4668 - RNA, 18 nt, artificial
  Chemically synthesized
ucucgcuggacguuggag

SEQ ID NO: 4669 - RNA, 18 nt, artificial
  Chemically synthesized
caagcagauaaagauguu

SEQ ID NO: 4670 - RNA, 18 nt, artificial
  Chemically synthesized
gauaaagauguucaaagg

SEQ ID NO: 4671 - RNA, 18 nt, artificial
  Chemically synthesized
gcacccgcaacaggcguu

SEQ ID NO: 4672 - RNA, 18 nt, artificial
  Chemically synthesized
caggccaaguucuucgcc

SEQ ID NO: 4673 - RNA, 18 nt, artificial
  Chemically synthesized
ugcacccgcaacaggcgu

SEQ ID NO: 4674 - RNA, 18 nt, artificial
  Chemically synthesized
cagguaccagaugggcug

SEQ ID NO: 4675 - RNA, 18 nt, artificial
  Chemically synthesized
gcuggcgcucggccuccu

SEQ ID NO: 4676 - RNA, 18 nt, artificial
  Chemically synthesized
gcgcucggccuccugcug

SEQ ID NO: 4677 - RNA, 18 nt, artificial
  Chemically synthesized
gacgccugcagcugcucc

SEQ ID NO: 4678 - RNA, 18 nt, artificial
  Chemically synthesized
uaccagaugggcugcgag

SEQ ID NO: 4679 - RNA, 18 nt, artificial
  Chemically synthesized
gcucggccuccugcugcu

SEQ ID NO: 4680 - RNA, 18 nt, artificial
  Chemically synthesized
cggugcacccgcaacagg

SEQ ID NO: 4681 - RNA, 18 nt, artificial
  Chemically synthesized
ccggugcacccgcaacag

SEQ ID NO: 4682 - RNA, 18 nt, artificial
  Chemically synthesized
acccgcaacaggcguuuu

SEQ ID NO: 4683 - RNA, 18 nt, artificial
  Chemically synthesized
aucaagcagauaaagaug

SEQ ID NO: 4684 - RNA, 18 nt, artificial
  Chemically synthesized
ccacagguaccagauggg

SEQ ID NO: 4685 - RNA, 18 nt, artificial
  Chemically synthesized
ccgacgccugcagcugcu

SEQ ID NO: 4686 - RNA, 18 nt, artificial
  Chemically synthesized
cuucaucgugcccuggga

SEQ ID NO: 4687 - RNA, 18 nt, artificial
  Chemically synthesized
cggccgacgccugcagcu

SEQ ID NO: 4688 - RNA, 18 nt, artificial
  Chemically synthesized
gugcacccgcaacaggcg

SEQ ID NO: 4689 - RNA, 18 nt, artificial
  Chemically synthesized
cgacgccugcagcugcuc

SEQ ID NO: 4690 - RNA, 18 nt, artificial
  Chemically synthesized
accaggccaaguucuucg

SEQ ID NO: 4691 - RNA, 18 nt, artificial
  Chemically synthesized
ugccucuggauggacugg

SEQ ID NO: 4692 - RNA, 18 nt, artificial
  Chemically synthesized
aacaggcguuuugcaaug

SEQ ID NO: 4693 - RNA, 18 nt, artificial
  Chemically synthesized
cucggccuccugcugcug

SEQ ID NO: 4694 - RNA, 18 nt, artificial
  Chemically synthesized
cggccuccugcugcuggc

SEQ ID NO: 4695 - RNA, 18 nt, artificial
  Chemically synthesized
ccaggccaaguucuucgc

SEQ ID NO: 4696 - RNA, 18 nt, artificial
  Chemically synthesized
cuggcgcucggccuccug

SEQ ID NO: 4697 - RNA, 18 nt, artificial
  Chemically synthesized
ucggccuccugcugcugg

SEQ ID NO: 4698 - RNA, 18 nt, artificial
  Chemically synthesized
uggcgcucggccuccugc

SEQ ID NO: 4699 - RNA, 18 nt, artificial
  Chemically synthesized
agguaccagaugggcugc

SEQ ID NO: 4700 - RNA, 18 nt, artificial
  Chemically synthesized
cugugacuucaucgugcc

SEQ ID NO: 4701 - RNA, 18 nt, artificial
  Chemically synthesized
gacuucaucgugcccugg

SEQ ID NO: 4702 - RNA, 18 nt, artificial
  Chemically synthesized
acgccugcagcugcuccc

SEQ ID NO: 4703 - RNA, 18 nt, artificial
  Chemically synthesized
aagagccugaaccacagg

SEQ ID NO: 4704 - RNA, 18 nt, artificial
  Chemically synthesized
cagggccaaagcggucag

SEQ ID NO: 4705 - RNA, 18 nt, artificial
  Chemically synthesized
ugacuucaucgugcccug

SEQ ID NO: 4706 - RNA, 18 nt, artificial
  Chemically synthesized
ugugacuucaucgugccc

SEQ ID NO: 4707 - RNA, 18 nt, artificial
  Chemically synthesized
acucgcagcccaucuggu

SEQ ID NO: 4708 - RNA, 18 nt, artificial
  Chemically synthesized
agcccaucugguaccugu

SEQ ID NO: 4709 - RNA, 18 nt, artificial
  Chemically synthesized
cugugguucaggcucuuc

SEQ ID NO: 4710 - RNA, 18 nt, artificial
  Chemically synthesized
ucuugaugcaggcgaaga

SEQ ID NO: 4711 - RNA, 18 nt, artificial
  Chemically synthesized
aacuuggccuggugcccg

SEQ ID NO: 4712 - RNA, 18 nt, artificial
  Chemically synthesized
gcagcaggaggccgagcg

SEQ ID NO: 4713 - RNA, 18 nt, artificial
  Chemically synthesized
uguuuccaggaagggaug

SEQ ID NO: 4714 - RNA, 18 nt, artificial
  Chemically synthesized
aaacgccuguugcgggug

SEQ ID NO: 4715 - RNA, 18 nt, artificial
  Chemically synthesized
cagcugcaggcgucggcc

SEQ ID NO: 4716 - RNA, 18 nt, artificial
  Chemically synthesized
caguccauccagaggcac

SEQ ID NO: 4717 - RNA, 18 nt, artificial
  Chemically synthesized
ugguaccugugguucagg

SEQ ID NO: 4718 - RNA, 18 nt, artificial
  Chemically synthesized
uucaugcuguuuccagga

SEQ ID NO: 4719 - RNA, 18 nt, artificial
  Chemically synthesized
uccaacguccagcgagac

SEQ ID NO: 4720 - RNA, 18 nt, artificial
  Chemically synthesized
gcagcugcaggcgucggc

SEQ ID NO: 4721 - RNA, 18 nt, artificial
  Chemically synthesized
caucugguaccugugguu

SEQ ID NO: 4722 - RNA, 18 nt, artificial
  Chemically synthesized
uguugcgggugcaccggg

SEQ ID NO: 4723 - RNA, 18 nt, artificial
  Chemically synthesized
gcccaucugguaccugug

SEQ ID NO: 4724 - RNA, 18 nt, artificial
  Chemically synthesized
caaaacgccuguugcggg

SEQ ID NO: 4725 - RNA, 18 nt, artificial
  Chemically synthesized
acaucuuuaucugcuuga

SEQ ID NO: 4726 - RNA, 18 nt, artificial
  Chemically synthesized
gaagaacuuggccuggug

SEQ ID NO: 4727 - RNA, 18 nt, artificial
  Chemically synthesized
ccaucugguaccuguggu

SEQ ID NO: 4728 - RNA, 18 nt, artificial
  Chemically synthesized
cuccaacguccagcgaga

SEQ ID NO: 4729 - RNA, 18 nt, artificial
  Chemically synthesized
aacaucuuuaucugcuug

SEQ ID NO: 4730 - RNA, 18 nt, artificial
  Chemically synthesized
ccuuugaacaucuuuauc

SEQ ID NO: 4731 - RNA, 18 nt, artificial
  Chemically synthesized
aacgccuguugcgggugc

SEQ ID NO: 4732 - RNA, 18 nt, artificial
  Chemically synthesized
ggcgaagaacuuggccug

SEQ ID NO: 4733 - RNA, 18 nt, artificial
  Chemically synthesized
acgccuguugcgggugca

SEQ ID NO: 4734 - RNA, 18 nt, artificial
  Chemically synthesized
cagcccaucugguaccug

SEQ ID NO: 4735 - RNA, 18 nt, artificial
  Chemically synthesized
aggaggccgagcgccagc

SEQ ID NO: 4736 - RNA, 18 nt, artificial
  Chemically synthesized
cagcaggaggccgagcgc

SEQ ID NO: 4737 - RNA, 18 nt, artificial
  Chemically synthesized
ggagcagcugcaggcguc

SEQ ID NO: 4738 - RNA, 18 nt, artificial
  Chemically synthesized
cucgcagcccaucuggua

SEQ ID NO: 4739 - RNA, 18 nt, artificial
  Chemically synthesized
agcagcaggaggccgagc

SEQ ID NO: 4740 - RNA, 18 nt, artificial
  Chemically synthesized
ccuguugcgggugcaccg

SEQ ID NO: 4741 - RNA, 18 nt, artificial
  Chemically synthesized
cuguugcgggugcaccgg

SEQ ID NO: 4742 - RNA, 18 nt, artificial
  Chemically synthesized
aaaacgccuguugcgggu

SEQ ID NO: 4743 - RNA, 18 nt, artificial
  Chemically synthesized
caucuuuaucugcuugau

SEQ ID NO: 4744 - RNA, 18 nt, artificial
  Chemically synthesized
cccaucugguaccugugg

SEQ ID NO: 4745 - RNA, 18 nt, artificial
  Chemically synthesized
agcagcugcaggcgucgg

SEQ ID NO: 4746 - RNA, 18 nt, artificial
  Chemically synthesized
ucccagggcacgaugaag

SEQ ID NO: 4747 - RNA, 18 nt, artificial
  Chemically synthesized
agcugcaggcgucggccg

SEQ ID NO: 4748 - RNA, 18 nt, artificial
  Chemically synthesized
cgccuguugcgggugcac

SEQ ID NO: 4749 - RNA, 18 nt, artificial
  Chemically synthesized
gagcagcugcaggcgucg

SEQ ID NO: 4750 - RNA, 18 nt, artificial
  Chemically synthesized
cgaagaacuuggccuggu

SEQ ID NO: 4751 - RNA, 18 nt, artificial
  Chemically synthesized
ccaguccauccagaggca

SEQ ID NO: 4752 - RNA, 18 nt, artificial
  Chemically synthesized
cauugcaaaacgccuguu

SEQ ID NO: 4753 - RNA, 18 nt, artificial
  Chemically synthesized
cagcagcaggaggccgag

SEQ ID NO: 4754 - RNA, 18 nt, artificial
  Chemically synthesized
gccagcagcaggaggccg

SEQ ID NO: 4755 - RNA, 18 nt, artificial
  Chemically synthesized
gcgaagaacuuggccugg

SEQ ID NO: 4756 - RNA, 18 nt, artificial
  Chemically synthesized
caggaggccgagcgccag

SEQ ID NO: 4757 - RNA, 18 nt, artificial
  Chemically synthesized
ccagcagcaggaggccga

SEQ ID NO: 4758 - RNA, 18 nt, artificial
  Chemically synthesized
gcaggaggccgagcgcca

SEQ ID NO: 4759 - RNA, 18 nt, artificial
  Chemically synthesized
gcagcccaucugguaccu

SEQ ID NO: 4760 - RNA, 18 nt, artificial
  Chemically synthesized
ggcacgaugaagucacag

SEQ ID NO: 4761 - RNA, 18 nt, artificial
  Chemically synthesized
ccagggcacgaugaaguc

SEQ ID NO: 4762 - RNA, 18 nt, artificial
  Chemically synthesized
gggagcagcugcaggcgu

SEQ ID NO: 4763 - RNA, 18 nt, artificial
  Chemically synthesized
ccugugguucaggcucuu

SEQ ID NO: 4764 - RNA, 18 nt, artificial
  Chemically synthesized
cugaccgcuuuggcccug

SEQ ID NO: 4765 - RNA, 18 nt, artificial
  Chemically synthesized
cagggcacgaugaaguca

SEQ ID NO: 4766 - RNA, 18 nt, Artificial Sequence
  Chemically synthesized
gggcacgaugaagucaca

SEQ ID NO: 4767 - RNA, 19 nt, artificial
  Chemically synthesized
ggaggaaagaaggaauaua

SEQ ID NO: 4768 - RNA, 19 nt, artificial
  Chemically synthesized
ggacguuggaggaaagaaa

SEQ ID NO: 4769 - RNA, 19 nt, artificial
  Chemically synthesized
gggucucgcuggacguuga

SEQ ID NO: 4770 - RNA, 19 nt, artificial
  Chemically synthesized
ggacugggucacagagaaa

SEQ ID NO: 4771 - RNA, 19 nt, artificial
  Chemically synthesized
cugcaucaagagaagugaa

SEQ ID NO: 4772 - RNA, 19 nt, artificial
  Chemically synthesized
gaggaaagaaggaauauca

SEQ ID NO: 4773 - RNA, 19 nt, artificial
  Chemically synthesized
gcuggacguuggaggaaaa

SEQ ID NO: 4774 - RNA, 19 nt, artificial
  Chemically synthesized
ggcguuuugcaaugcagaa

SEQ ID NO: 4775 - RNA, 19 nt, artificial
  Chemically synthesized
gccugcaucaagagaagua

SEQ ID NO: 4776 - RNA, 19 nt, artificial
  Chemically synthesized
aggaaagaaggaauaucua

SEQ ID NO: 4777 - RNA, 19 nt, artificial
  Chemically synthesized
agaucaagcagauaaagaa

SEQ ID NO: 4778 - RNA, 19 nt, artificial
  Chemically synthesized
guuggaggaaagaaggaaa

SEQ ID NO: 4779 - RNA, 19 nt, artificial
  Chemically synthesized
gcugcgagugcaagaucaa

SEQ ID NO: 4780 - RNA, 19 nt, artificial
  Chemically synthesized
gggcugcgagugcaagaua

SEQ ID NO: 4781 - RNA, 19 nt, artificial
  Chemically synthesized
gacaucccuuccuggaaaa

SEQ ID NO: 4782 - RNA, 19 nt, artificial
  Chemically synthesized
gauggacugggucacagaa

SEQ ID NO: 4783 - RNA, 19 nt, artificial
  Chemically synthesized
gccucuggauggacuggga

SEQ ID NO: 4784 - RNA, 19 nt, artificial
  Chemically synthesized
gagugccucuggauggaca

SEQ ID NO: 4785 - RNA, 19 nt, artificial
  Chemically synthesized
ggcaccaggccaaguucua

SEQ ID NO: 4786 - RNA, 19 nt, artificial
  Chemically synthesized
gcaacaggcguuuugcaaa

SEQ ID NO: 4787 - RNA, 19 nt, artificial
  Chemically synthesized
gacguuggaggaaagaaga

SEQ ID NO: 4788 - RNA, 19 nt, artificial
  Chemically synthesized
gaucaagcagauaaagaua

SEQ ID NO: 4789 - RNA, 19 nt, artificial
  Chemically synthesized
ugagaucaagcagauaaaa

SEQ ID NO: 4790 - RNA, 19 nt, artificial
  Chemically synthesized
ugugcauuuugcagaaaca

SEQ ID NO: 4791 - RNA, 19 nt, artificial
  Chemically synthesized
gaaccacagguaccagaua

SEQ ID NO: 4792 - RNA, 19 nt, artificial
  Chemically synthesized
cacccagaagaagagccua

SEQ ID NO: 4793 - RNA, 19 nt, artificial
  Chemically synthesized
ccuuccuggaaacagcaua

SEQ ID NO: 4794 - RNA, 19 nt, artificial
  Chemically synthesized
ugggcugcgagugcaagaa

SEQ ID NO: 4795 - RNA, 19 nt, artificial
  Chemically synthesized
gaugggcugcgagugcaaa

SEQ ID NO: 4796 - RNA, 19 nt, artificial
  Chemically synthesized
aucccuuccuggaaacaga

SEQ ID NO: 4797 - RNA, 19 nt, artificial
  Chemically synthesized
agugccucuggauggacua

SEQ ID NO: 4798 - RNA, 19 nt, artificial
  Chemically synthesized
uggaggaaagaaggaauaa

SEQ ID NO: 4799 - RNA, 19 nt, artificial
  Chemically synthesized
gggcaccaggccaaguuca

SEQ ID NO: 4800 - RNA, 19 nt, artificial
  Chemically synthesized
gugcauuuugcagaaacua

SEQ ID NO: 4801 - RNA, 19 nt, artificial
  Chemically synthesized
ccagaugggcugcgaguga

SEQ ID NO: 4802 - RNA, 19 nt, artificial
  Chemically synthesized
cgagugccucuggauggaa

SEQ ID NO: 4803 - RNA, 19 nt, artificial
  Chemically synthesized
cugcgagugcaagaucaca

SEQ ID NO: 4804 - RNA, 19 nt, artificial
  Chemically synthesized
ucuggauggacugggucaa

SEQ ID NO: 4805 - RNA, 19 nt, artificial
  Chemically synthesized
guaccagaugggcugcgaa

SEQ ID NO: 4806 - RNA, 19 nt, artificial
  Chemically synthesized
guagugaucagggccaaaa

SEQ ID NO: 4807 - RNA, 19 nt, artificial
  Chemically synthesized
ggcgcucggccuccugcua

SEQ ID NO: 4808 - RNA, 19 nt, artificial
  Chemically synthesized
uggauggacugggucacaa

SEQ ID NO: 4809 - RNA, 19 nt, artificial
  Chemically synthesized
cccuuccuggaaacagcaa

SEQ ID NO: 4810 - RNA, 19 nt, artificial
  Chemically synthesized
accagaugggcugcgagua

SEQ ID NO: 4811 - RNA, 19 nt, artificial
  Chemically synthesized
acagguaccagaugggcua

SEQ ID NO: 4812 - RNA, 19 nt, artificial
  Chemically synthesized
cgggcaccaggccaaguua

SEQ ID NO: 4813 - RNA, 19 nt, artificial
  Chemically synthesized
caucccuuccuggaaacaa

SEQ ID NO: 4814 - RNA, 19 nt, artificial
  Chemically synthesized
cacccgcaacaggcguuua

SEQ ID NO: 4815 - RNA, 19 nt, artificial
  Chemically synthesized
uauauuccuucuuuccucc

SEQ ID NO: 4816 - RNA, 19 nt, artificial
  Chemically synthesized
uuucuuuccuccaacgucc

SEQ ID NO: 4817 - RNA, 19 nt, artificial
  Chemically synthesized
ucaacguccagcgagaccc

SEQ ID NO: 4818 - RNA, 19 nt, artificial
  Chemically synthesized
uuucucugugacccagucc

SEQ ID NO: 4819 - RNA, 19 nt, artificial
  Chemically synthesized
uucacuucucuugaugcag

SEQ ID NO: 4820 - RNA, 19 nt, artificial
  Chemically synthesized
ugauauuccuucuuuccuc

SEQ ID NO: 4821 - RNA, 19 nt, artificial
  Chemically synthesized
uuuuccuccaacguccagc

SEQ ID NO: 4822 - RNA, 19 nt, artificial
  Chemically synthesized
uucugcauugcaaaacgcc

SEQ ID NO: 4823 - RNA, 19 nt, artificial
  Chemically synthesized
uacuucucuugaugcaggc

SEQ ID NO: 4824 - RNA, 19 nt, artificial
  Chemically synthesized
uagauauuccuucuuuccu

SEQ ID NO: 4825 - RNA, 19 nt, artificial
  Chemically synthesized
uucuuuaucugcuugaucu

SEQ ID NO: 4826 - RNA, 19 nt, artificial
  Chemically synthesized
uuuccuucuuuccuccaac

SEQ ID NO: 4827 - RNA, 19 nt, artificial
  Chemically synthesized
uugaucuugcacucgcagc

SEQ ID NO: 4828 - RNA, 19 nt, artificial
  Chemically synthesized
uaucuugcacucgcagccc

SEQ ID NO: 4829 - RNA, 19 nt, artificial
  Chemically synthesized
uuuuccaggaagggauguc

SEQ ID NO: 4830 - RNA, 19 nt, artificial
  Chemically synthesized
uucugugacccaguccauc

SEQ ID NO: 4831 - RNA, 19 nt, artificial
  Chemically synthesized
ucccaguccauccagaggc

SEQ ID NO: 4832 - RNA, 19 nt, artificial
  Chemically synthesized
uguccauccagaggcacuc

SEQ ID NO: 4833 - RNA, 19 nt, artificial
  Chemically synthesized
uagaacuuggccuggugcc

SEQ ID NO: 4834 - RNA, 19 nt, artificial
  Chemically synthesized
uuugcaaaacgccuguugc

SEQ ID NO: 4835 - RNA, 19 nt, artificial
  Chemically synthesized
ucuucuuuccuccaacguc

SEQ ID NO: 4836 - RNA, 19 nt, artificial
  Chemically synthesized
uaucuuuaucugcuugauc

SEQ ID NO: 4837 - RNA, 19 nt, artificial
  Chemically synthesized
uuuuaucugcuugaucuca

SEQ ID NO: 4838 - RNA, 19 nt, artificial
  Chemically synthesized
uguuucugcaaaaugcaca

SEQ ID NO: 4839 - RNA, 19 nt, artificial
  Chemically synthesized
uaucugguaccugugguuc

SEQ ID NO: 4840 - RNA, 19 nt, artificial
  Chemically synthesized
uaggcucuucuucugggug

SEQ ID NO: 4841 - RNA, 19 nt, artificial
  Chemically synthesized
uaugcuguuuccaggaagg

SEQ ID NO: 4842 - RNA, 19 nt, artificial
  Chemically synthesized
uucuugcacucgcagccca

SEQ ID NO: 4843 - RNA, 19 nt, artificial
  Chemically synthesized
uuugcacucgcagcccauc

SEQ ID NO: 4844 - RNA, 19 nt, artificial
  Chemically synthesized
ucuguuuccaggaagggau

SEQ ID NO: 4845 - RNA, 19 nt, artificial
  Chemically synthesized
uaguccauccagaggcacu

SEQ ID NO: 4846 - RNA, 19 nt, artificial
  Chemically synthesized
uuauuccuucuuuccucca

SEQ ID NO: 4847 - RNA, 19 nt, artificial
  Chemically synthesized
ugaacuuggccuggugccc

SEQ ID NO: 4848 - RNA, 19 nt, artificial
  Chemically synthesized
uaguuucugcaaaaugcac

SEQ ID NO: 4849 - RNA, 19 nt, artificial
  Chemically synthesized
ucacucgcagcccaucugg

SEQ ID NO: 4850 - RNA, 19 nt, artificial
  Chemically synthesized
uuccauccagaggcacucg

SEQ ID NO: 4851 - RNA, 19 nt, artificial
  Chemically synthesized
ugugaucuugcacucgcag

SEQ ID NO: 4852 - RNA, 19 nt, artificial
  Chemically synthesized
uugacccaguccauccaga

SEQ ID NO: 4853 - RNA, 19 nt, artificial
  Chemically synthesized
uucgcagcccaucugguac

SEQ ID NO: 4854 - RNA, 19 nt, artificial
  Chemically synthesized
uuuuggcccugaucacuac

SEQ ID NO: 4855 - RNA, 19 nt, artificial
  Chemically synthesized
uagcaggaggccgagcgcc

SEQ ID NO: 4856 - RNA, 19 nt, artificial
  Chemically synthesized
uugugacccaguccaucca

SEQ ID NO: 4857 - RNA, 19 nt, artificial
  Chemically synthesized
uugcuguuuccaggaaggg

SEQ ID NO: 4858 - RNA, 19 nt, artificial
  Chemically synthesized
uacucgcagcccaucuggu

SEQ ID NO: 4859 - RNA, 19 nt, artificial
  Chemically synthesized
uagcccaucugguaccugu

SEQ ID NO: 4860 - RNA, 19 nt, artificial
  Chemically synthesized
uaacuuggccuggugcccg

SEQ ID NO: 4861 - RNA, 19 nt, artificial
  Chemically synthesized
uuguuuccaggaagggaug

SEQ ID NO: 4862 - DNA, 19 bp, Artificial Sequence
  Chemically synthesized
uaaacgccuguugcgggug
